(19) United States
(12) Patent Application Publication
(10) Pub. No.: US 2024/0084301 A1
(43) Pub. Date: Mar. 14, 2024

(54) RNAI CONSTRUCTS AND METHODS FOR INHIBITING FAM13A EXPRESSION

(71) Applicant: AMGEN INC., Thousand Oaks, CA (US)

(72) Inventors: Elizabeth Ann KILLION, Van Nuys, CA (US); Jerry Ryan HOLDER, Simi Valley, CA (US); Bryan MEADE, Westlake Village, CA (US); Justin K. MURRAY, Moorpark, CA (US); Oliver R. HOMANN, Berkeley, CA (US); Briana Renee GRIEGO, Oxnard, CA (US); Murielle Marie VENIANT ELLISON, Thousand Oaks, CA (US)

(73) Assignee: AMGEN INC., Thousand Oaks, CA (US)

(21) Appl. No.: 18/357,495

(22) Filed: Jul. 24, 2023

Related U.S. Application Data
(60) Provisional application No. 63/391,860, filed on Jul. 25, 2022.

(51) Int. Cl. C12N 15/113; A61P 1/16; A61P 3/04

(52) U.S. Cl. CPC C12N 15/113; A61P 1/16; A61P 3/04; C12N 2310/14; C12N 2310/315; C12N 2310/321; C12N 2310/322

(57) ABSTRACT

The present application relates to compositions and methods for modulating expression of Family with Sequence Similarity 13 Member A (FAM13A) protein. In particular, the present application relates to nucleic acid-based therapeutics for reducing FAM13A gene expression via RNA interference and methods of using such nucleic acid-based therapeutics to reduce abdominal adiposity, reduce body weight, reduce fat mass, improve metabolic parameters including insulin resistance and non-alcoholic steatohepatitis (NASH), and reduce risk of myocardial infarction.

### CROSS REFERENCE TO RELATED APPLICATIONS

[0001] This application claims priority to U.S. Provisional Patent Application No. 63/391,860, filed Jul. 25, 2022, which is incorporated herein by reference in its entirety.

### TECHNICAL FIELD

[0002] The present application relates to compositions and methods for modulating expression of Family with Sequence Similarity 13 Member A (FAM13A) protein. In particular, the present application relates to nucleic acid-based therapeutics for reducing FAM13A gene expression via RNA interference and methods of using such nucleic acid-based therapeutics.

### REFERENCE TO THE SEQUENCE LISTING

[0003] The present application is being filed along with a Sequence Listing in electronic format. The Sequence Listing is provided as an XML file entitled 10121-U502-SEC_ST26, created Jul. 14, 2023, which is 2.81 MB in size. The information in the electronic format of the Sequence Listing is incorporated herein by reference in its entirety.

### BACKGROUND

[0004] Obesity, or excess adiposity, is recognized as a disease and is established as a major risk factor for cardiovascular disease (CVD). The most common measure of adiposity, body-mass-index (BMI), results in increased odds risk of myocardial infarction (MI). However, this association is substantially reduced after adjustment for waist-to-hip ratio (WHR), a measurement that reflects a visceral body fat distribution pattern (also known as central or abdominal obesity). WHR has been shown to be more robustly related to MI risk with individuals in the highest quintile for WHR having a 2.52-fold increase in odds ratio (p<0.001), a finding that persists even after adjustment for BMI. Yusuf et al., Lancet 366:1640-1649 (2005); Cao et al., Medicine (Baltimore) 97, e11639 (2018); de Koning et al., Eur. Heart J., 28, 850-856 (2007). These data indicate that WHR is a better predictor of MI risk than BMI and that this metric overcomes some key limitations of BMI (e.g., high muscle mass).

[0005] FAM13A (also known as FAM13A1, KIAA0914, or ARHGAP48) is a cytosolic protein that has been shown to regulate AMP-activated protein kinase (AMPK) activity, and it has been linked to regulation of hepatic glucose, lipid metabolism, body fat distribution, and adipocyte function. Lin et al., iScience 23, 100928 (2020); Fathzadeh et al., Nature Communications 11, 1465 (2020). For example, human genetic evidence has linked FAM13A with HDL cholesterol, body mass index (BMI)-adjusted fasting insulin levels, and WHR adjusted for BMI. In vitro, FAM13A knockdown in human mesenchymal stem cells increases adipocyte differentiation and thermogenesis while overexpression causes apoptosis of pre-adipocytes and inhibits adipogenesis. Lundback et al., Diabetologia, 2018; Tang et al., Int. J. Obesity, 2019; Fathzadeh et al., Nat. Comm., 2020. Additionally, FAM13A KO mice are protected against diet-induced obesity (DIO), have improved hepatic insulin sensitivity, and increased hepatocyte oxygen consumption rate. Lin et al., iScience, 2020.

### SUMMARY

[0006] The present application relates, in part, to the design and generation of RNAi constructs that target the FAM13A gene and reduce its expression. The sequence-specific inhibition of FAM13A gene expression is useful for reducing abdominal adiposity, reducing body weight, reducing fat mass, improving metabolic parameters including insulin resistance and non-alcoholic steatohepatitis (NASH), and reducing risk of myocardial infarction. Accordingly, in one embodiment, the present application provides an RNAi construct comprising a sense strand and an antisense strand, wherein the antisense strand comprises a region comprising a sequence that is substantially complementary to a FAM13A mRNA sequence. In some embodiments, the RNAi construct is targeted only to the liver. In some embodiments, the antisense strand comprises a sequence that is substantially complementary to the sequence of at least 15 contiguous nucleotides of a region of the human FAM13A mRNA sequence (SEQ ID NO: 1) with no more than 1, 2, or 3 mismatches. In some embodiments, the antisense strand comprises a region comprising a sequence that is substantially complementary to at least 15 contiguous nucleotides within particular regions of the FAM13A mRNA sequence set forth in SEQ ID NO: 1, such as within nucleotides 1300-1375 or 4900-5300 of SEQ ID NO: 1. In certain embodiments, the antisense strand comprises a region comprising at least 15 contiguous nucleotides from an antisense sequence listed in Table 1 or Table 2.

[0007] In some embodiments, the sense strand of the RNAi constructs described herein comprises a sequence that is sufficiently complementary to the sequence of the antisense strand to form a duplex region of about 15 to about 30 base pairs in length, about 17 to about 24 base pairs in length, or about 19 to about 21 base pairs in length. In some embodiments, the sense and antisense strands are each independently about 19 to about 30 nucleotides in length, or about 19 to about 23 nucleotides in length. In some embodiments, the RNAi constructs comprise one or two blunt ends. In other embodiments, the RNAi constructs comprise one or two nucleotide overhangs. Such nucleotide overhangs may comprise 1 to 6 unpaired nucleotides and can be located at the 3′ end of the sense strand, the 3′ end of the antisense strand, or the 3′ end of both the sense and antisense strand. In certain embodiments, the RNAi constructs comprise an overhang of two unpaired nucleotides at the 3′ end of the sense strand and the 3′ end of the antisense strand. In other embodiments, the RNAi constructs comprise an overhang of two unpaired nucleotides at the 3′ end of the antisense strand and a blunt end at the 3′ end of the sense strand/5′ end of the antisense strand.

[0008] The disclosed RNAi constructs may comprise one or more modified nucleotides, including nucleotides having modifications to the ribose ring, nucleobase, or phosphodiester backbone. In some embodiments, the RNAi constructs comprise one or more 2′-modified nucleotides. Such 2′-modified nucleotides can include 2′-fluoro modified nucleotides, 2′-O-methyl modified nucleotides, 2′-O-methoxyethyl modified nucleotides, 2′-O-alkyl modified nucleotides, 2′-O-allyl modified nucleotides, bicyclic nucleic acids (BNA), deoxyribonucleotides, or combinations thereof. In one particular embodiment, the RNAi constructs comprise one or more 2′-fluoro modified nucleotides, 2′-O-methyl modified nucleotides, or combinations thereof. In some embodiments, all of the nucleotides in the sense and antisense strand of the RNAi construct are modified nucleotides. Abasic nucleotides may be incorporated into the disclosed RNAi constructs, for example, as the terminal nucleotide at the 3′ end, the 5′ end, or both the 3′ end and the 5′ end of the sense strand. In such embodiments, the abasic nucleotide may be inverted, e.g., linked to the adjacent nucleotide through a 3′-3′ internucleotide linkage or a 5′-5′ internucleotide linkage.

[0009] In some embodiments, the RNAi constructs comprise at least one backbone modification, such as a modified internucleotide or internucleotide linkage. In certain embodiments, the RNAi constructs described herein comprise at least one phosphorothioate internucleotide linkage. In particular embodiments, the phosphorothioate internucleotide linkages may be positioned at the 3′ or 5′ ends of the sense and/or antisense strands. For instance, in some embodiments, the antisense strand comprises two consecutive phosphorothioate internucleotide linkages between the terminal nucleotides at both the 3′ and 5′ ends. In some such embodiments, the sense strand comprises one or two phosphorothioate internucleotide linkages between the terminal nucleotides at its 3′ end.

[0010] In some embodiments, the RNAi constructs of this application may target a particular region of the human FAM13A mRNA transcript set forth in SEQ ID NO: 1. In some embodiments, the sequence of the antisense strand may be fully complementary to the sequence of at least 15 contiguous nucleotides of the specific regions of the human FAM13A transcript (SEQ ID NO: 1). In some embodiments, the sequence of the antisense strand may be substantially complementary to the sequence of at least 15 contiguous nucleotides of the specific regions of the human FAM13A transcript (SEQ ID NO: 1) with no more than 1, 2, or 3 mismatches between the sequence of the antisense strand and the sequence of the specific regions of the human FAM13A transcript. In certain embodiments, the antisense strand and/or the sense strand of the RNAi constructs may comprise or consist of a sequence from the antisense and sense sequences listed in Table 1. In some embodiments, the sense and antisense strands, respectively, comprise or consist of SEQ ID NOs: 15 and 559, SEQ ID NOs: 24 and 568, SEQ ID NOs: 125 and 669, SEQ ID NOs: 127 and 671, SEQ ID NOs: 222 and 766, SEQ ID NOs: 406 and 950, SEQ ID NOs: 448 and 992, SEQ ID NOs: 498 and 1042, SEQ ID NOs: 502 and 1046, SEQ ID NOs: 503 and 1047, SEQ ID NOs: 504 and 1048, SEQ ID NOs: 513 and 1057, SEQ ID NOs: 526 and 1070, SEQ ID NOs: 527 and 1071, SEQ ID NOs: 533 and 1077, or SEQ ID NOs: 534 and 1078.

[0011] In some embodiments, the RNAi construct comprises particular sequences with particular modification patterns, which are referred to as duplexes herein. In certain embodiments, the antisense strand and/or the sense strand of the RNAi constructs, with particular modification patterns, may comprise or consist of antisense and sense sequences listed in Table 2 as particular duplexes. In some embodiments, the RNAi construct is a duplex called D-1557, D-1597, D-1612, D-1614, D-1623, D-1650, D-1667, D-1680, D-1682, D-1685, D-1686, D-1690, D-1697, D-1698, D-1699, D-1702, D-1704, D-1705, D-1709, D-1768, D-1846, D-1849, D-1853, D-1856, D-1858, D-1861, D-1862, D-1863, D-1864, D-1865, D-1866, D-1868, D-1869, D-1870, D-1871, D-1873, D-1875, D-1876, D-1877, D-1878, D-1879, D-1880, D-1881, D-1883, D-1884, D-1885, D-1886, D-1887, D-1888, D-1899, D-1896, D-1955, D-1970, D-1972, D-1975, D-1976, D-1977, D-1979, D-1980, D-1981, D-1982, D-1983, D-1984, D-1985, D-1987, D-1988, D-1989, D-1990, D-1991, D-1992, D-1993, D-1994, D-1995, D-1996, D-1997, D-1998, D-2000, D-2001, D-2002, D-2003, D-2004, D-2005, D-2012, D-2013, D-2014, D-2017, D-2021, D-2022, D-2023, D-2040, D-2044, D-2045, D-2047, D-2049, D-2051, D-2052, D-2053, D-2054, D-2058, D-2061, D-2075, D-2077, D-2079, D-2080, D-2081, D-2083, D-2090, D-2091, or D-2093. In some embodiments, the RNAi construct is a duplex observed to knock down FAM13A expression by greater than 80%.

[0012] The disclosed RNAi constructs may comprise a ligand to facilitate delivery or uptake of the RNAi constructs to specific tissues or cells, such as liver or adipose cells. In certain embodiments, the ligand targets delivery of the RNAi constructs to hepatocytes. In these and other embodiments, the ligand may comprise galactose, galactosamine, or N-acetyl-galactosamine (GalNAc). In certain embodiments, the ligand comprises a multivalent galactose or multivalent GalNAc moiety, such as a trivalent or tetravalent galactose or GalNAc moiety. The ligand may be covalently attached to the 5′ or 3′ end of the sense strand of the RNAi construct, optionally through a linker. In some embodiments, the RNAi constructs comprise a ligand and linker comprising a structure according to any one of Formulas I to IX described herein. In certain embodiments, the RNAi constructs comprise a ligand and linker comprising a structure according to Formula VII. In other embodiments, the RNAi constructs comprise a ligand and linker comprising a structure according to Formula IV. In some embodiments, the ligand comprises a long-chain fatty acid such as lauric acid (C12), myristic acid (C14), palmitic acid (C16), stearic acid (C18), eicosapentaenoic acid (C20), or docosanoic acid (C22). In some embodiments, the ligand is attached through a phosphodiester or phosphorothioate linkage.

[0013] The present application also provides pharmaceutical compositions comprising any of the RNAi constructs described herein and a pharmaceutically acceptable carrier, excipient, or diluent. Such pharmaceutical compositions are particularly useful for reducing expression of the FAM13A gene in the cells (e.g., liver or adipose cells) of a patient in need thereof. Patients who may be administered a disclosed pharmaceutical composition include patients diagnosed with or at risk of obesity, including patients displaying a high WHR and patients diagnosed with abdominal obesity. Patients who may be administered a disclosed pharmaceutical composition also can include patients diagnosed with or at risk of metabolic conditions such as fatty liver disease (e.g., NAFLD, NASH, alcoholic fatty liver disease, or alcoholic steatohepatitis), insulin resistance and type 2 diabetes (T2D), hypertriglyceridemia, or hypercholesterolemia. The present application also provides methods of treating patients in need of reduction of expression of the FAM13A gene expression in their cells, including patients diagnosed with or at risk of obesity, abdominal obesity, fatty liver disease (e.g., NAFLD, NASH, alcoholic fatty liver disease, or alcoholic steatohepatitis), insulin resistance and type 2 diabetes (T2D), hypertriglyceridemia, or hypercholesterolemia. These methods comprise administering an RNAi construct or pharmaceutical composition described herein. In some embodiments, the RNAi construct is administered with a ligand that targets the RNAi construct to the liver or hepatocytes.

[0014] The use of FAM13A-targeting RNAi constructs in any of the methods described herein or for preparation of medicaments for administration according to the methods described herein is specifically contemplated. For instance, the present application includes a FAM13A-targeting RNAi construct for use in treating, preventing, or reducing the risk of developing obesity, abdominal obesity, fatty liver disease (e.g., NAFLD, NASH, alcoholic fatty liver disease, or alcoholic steatohepatitis), insulin resistance and type 2 diabetes (T2D), hypertriglyceridemia, or hypercholesterolemia in a patient in need thereof.

### BRIEF DESCRIPTION OF THE FIGURES

[0015] FIG. 1 shows the results of a genomic analysis performed to examine the association of three common FAM13A variants for their association with adjusted for BMI (WHRadjBMI), triglyceride levels, HDL cholesterol levels, systolic blood pressure, and FAM13A expression in subcutaneous adipose tissue eQTL data.

[0016] FIGS. 2A and 2B show the results of an in vitro dose-response study of Fam13a siRNA's effects in Renca cells and primary adipocytes.

[0017] FIGS. 3A-3D show the results of an in vivo study of Fam13a siRNA's ability to knock down murine Fam13a mRNA expression levels in the liver and white adipose tissue of mice.

[0018] FIGS. 4A-4C show the results of an in vivo study of Fam13a siRNA's effects on body weight and fat mass of mice.

[0019] FIG. 5 is a table showing the effects of C16- and GalNAc-linked Fam13a siRNA in obese mice after 60 days of treatment. Fam13a siRNAs had significant effects on body weight, fat mass, cumulative food intake, liver weight, insulin levels, total cholesterol, LDL cholesterol, and ALT levels.

[0020] FIG. 6 is a diagram compiling the locations which of a range of human FAM13A siRNA triggers target on the human FAM13A mRNA transcript. The depicted triggers were all efficacious in reducing FAM13A mRNA levels and are divided in this diagram according to whether the maximum observed knockdown for that trigger fell within the range of 40-60% knockdown, 60-80% knockdown, or greater than 80% knockdown.

[0021] FIGS. 7A-7R are depictions of different modification patterns that may be applied to siRNA trigger sequences, with each figure showing a hybridized sense (top) and antisense (bottom) strand. In these figures, the solid circles correspond to 2′-O-methyl ribonucleotides, the open circles correspond to 2′-deoxy-2′-fluoro (“2′-fluoro”) ribonucleotides, and the hatched circles correspond to inverted abasic deoxynucleotides. Bold lines indicate where a phosphorothioate bond is used in place of the standard phosphodiester bond between nucleotides. Finally, arrows represent where a ligand (e.g., GalNAc or a fatty acid) may be attached to a polynucleotide.

[0022] FIGS. 8A-8D show the results of testing FAM13A siRNA in an AAV human FAM13A mouse model. FIGS. 8A and 8B show that a range of different members of the T-4999 and T-5043 trigger families, respectively, reduced expression of FAM13A mRNA in the liver. FIGS. 8C and 8D show that C22-conjugated members of the T-4999 and T-5043 trigger families, and to a lesser extent GalNAc-conjugated members of the T-4999 and T-5043 trigger families, were able to reduce expression of FAM13A mRNA in adipose tissue. In each of FIGS. 8A-8D, the “*” denotes those duplexes that were conjugated to C22, while those without an asterisk were conjugated to GalNAc.

[0023] FIGS. 9A-9C show the results of testing human-mouse cross reactive FAM13A siRNA duplexes, with knockdown noted in liver, inguinal white adipose tissue, and epididymal white adipose tissue.

[0024] FIGS. 10A and 10B show that treating diet-induced obese (DIO) mice with human-mouse cross reactive FAM13A siRNA duplexes prevented the increases in body weight and fat mass associated with the DIO model.

[0025] FIGS. 11A-11E show the results of treating cynomolgus monkeys with a single dose of human-cynomolgus monkey cross reactive FAM13A siRNA. FIGS. 11A and 11B show that knockdown was achieved in both liver and adipose tissue. FIGS. 11C-11E show that FAM13A siRNA treatment resulted in decreases in serum cholesterol, LDL, and HDL, respectively.

### DETAILED DESCRIPTION

[0026] The present application is directed to compositions and methods for regulating the expression of the FAM13A gene in a cell or mammal. In some embodiments, compositions comprise RNAi constructs that target a mRNA transcribed from the FAM13A gene, particularly the human FAM13A gene, and reduce expression of the FAM13A protein in a cell or mammal. Such RNAi constructs are useful for treating, preventing, or reducing the risk of developing obesity, hepatosteatosis, insulin resistance and type 2 diabetes (T2D), hypertriglyceridemia, or hypercholesterolemia in a patient in need thereof.

### RNAi Constructs

[0027] As used herein, the term “RNAi construct” refers to an agent comprising an RNA molecule that is capable of downregulating expression of a target gene (e.g., the FAM13A gene) via an RNA interference mechanism when introduced into a cell. RNA interference is the process by which a nucleic acid molecule induces the cleavage and degradation of a target RNA molecule (e.g., messenger RNA or mRNA molecule) in a sequence-specific manner, e.g., through an RNA-induced silencing complex (RISC) pathway. In some embodiments, the RNAi construct comprises a double-stranded RNA molecule comprising two antiparallel strands of contiguous nucleotides that are sufficiently complementary to each other to hybridize to form a duplex region. “Hybridize” or “hybridization” refers to the pairing of complementary polynucleotides, typically via hydrogen bonding (e.g., Watson-Crick, Hoogsteen or reversed Hoogsteen hydrogen bonding) between complementary bases in the two polynucleotides. The strand comprising a region comprising a sequence that is substantially complementary to a target sequence (e.g., target mRNA) is referred to as the “antisense strand” or “guide strand.” The “sense strand” or “passenger strand” refers to the strand that includes a region that is substantially complementary to a region of the antisense strand. In some embodiments, the sense strand may comprise a region that has a sequence that is substantially identical to the target sequence.

[0028] A double-stranded RNA molecule may include chemical modifications to ribonucleotides, including modifications to the ribose sugar, base, or backbone components of the ribonucleotides, such as those described herein or known in the art. Any such modifications, as used in a double-stranded RNA molecule (e.g., siRNA, shRNA, or the like), are encompassed by the term “double-stranded RNA” for the purposes of this disclosure. Details on potential modifications to the RNAi constructs described herein are provided in the Modification and Preparation of RNAi Constructs section below.

[0029] As used herein, a first sequence is “complementary” to a second sequence if a polynucleotide comprising the first sequence can hybridize to a polynucleotide comprising the second sequence to form a duplex region under certain conditions, such as physiological conditions. Other such conditions can include moderate or stringent hybridization conditions, which are known to those of skill in the art. A first sequence is fully complementary (100% complementary) to a second sequence if a polynucleotide comprising the first sequence base pairs with a polynucleotide comprising the second sequence over the entire length of one or both nucleotide sequences without any mismatches. A sequence is “substantially complementary” to a target sequence, or has “substantial identity to” a target sequence, if the sequence is at least about 80%, 85%, 90%, 95%, 96%, 97%, 98%, or 99% complementary to a target sequence. Percent complementarity can be calculated by dividing the number of bases in a first sequence that are complementary to bases at corresponding positions in a second or target sequence by the total length of the first sequence. A sequence may also be said to be substantially complementary to another sequence if there are no more than 5, 4, 3, or 2 mismatches over a 30 base pair duplex region when the two sequences are hybridized. Generally, if any nucleotide overhangs, as defined herein, are present, the sequence of such overhangs is not considered in determining the degree of complementarity between two sequences. By way of example, a sense strand of 21 nucleotides in length and an antisense strand of 21 nucleotides in length that hybridize to form a 19 base pair duplex region with a 2-nucleotide overhang at the 3′ end of each strand would be fully complementary as the term is used herein.

[0030] In some embodiments, a region of the antisense strand comprises a sequence that is substantially or fully complementary to a region of the target RNA sequence (e.g., the FAM13A mRNA sequence). In such embodiments, the sense strand may comprise a sequence that is fully complementary to the sequence of the antisense strand. In other such embodiments, the sense strand may comprise a sequence that is substantially complementary to the sequence of the antisense strand, e.g., having 1, 2, 3, 4, or 5 mismatches in the duplex region formed by the sense and antisense strands. In certain embodiments, it is preferred that any mismatches occur within the terminal regions (e.g., within 6, 5, 4, 3, or 2 nucleotides of the 5′ and/or 3′ ends of the strands). In one embodiment, any mismatches in the duplex region formed from the sense and antisense strands occur within 6, 5, 4, 3, or 2 nucleotides of the 5′ end of the antisense strand.

[0031] In certain embodiments, the sense strand and antisense strand of the double-stranded RNA may be two separate molecules that hybridize to form a duplex region but are otherwise unconnected. Such double-stranded RNA molecules formed from two separate strands are referred to as “small interfering RNAs” or “short interfering RNAs” (siRNAs). Thus, in some embodiments, the RNAi constructs comprise an siRNA.

[0032] In other embodiments, the sense strand and the antisense strand that hybridize to form a duplex region may be part of a single RNA molecule, i.e., the sense and antisense strands are part of a self-complementary region of a single RNA molecule. In such cases, a single RNA molecule comprises a duplex region (also referred to as a stem region) and a loop region. The 3′ end of the sense strand is connected to the 5′ end of the antisense strand by a contiguous sequence of unpaired nucleotides, which will form the loop region. The loop region is typically of a sufficient length to allow the RNA molecule to fold back on itself such that the antisense strand can base pair with the sense strand to form the duplex or stem region. The loop region can comprise from about 3 to about 25, from about 5 to about 15, or from about 8 to about 12 unpaired nucleotides. Such RNA molecules with at least partially self-complementary regions are referred to as “short hairpin RNAs” (shRNAs). In certain embodiments, the RNAi constructs comprise a shRNA. The length of a single, at least partially self-complementary RNA molecule can be from about 40 nucleotides to about 100 nucleotides, from about 45 nucleotides to about 85 nucleotides, or from about 50 nucleotides to about 60 nucleotides and comprise a duplex region and loop region each having the lengths recited herein.

[0033] In some embodiments, the RNAi constructs comprise a sense strand and an antisense strand, wherein the antisense strand comprises a region having a sequence that is substantially or fully complementary to a FAM13A messenger RNA (mRNA) sequence. As used herein, a “FAM13A mRNA sequence” refers to any messenger RNA sequence, including allelic variants and splice variants, encoding a FAM13A protein, including FAM13A protein variants or isoforms from any species (e.g., non-human primate, human).

[0034] A FAM13A mRNA sequence also includes the transcript sequence expressed as its complementary DNA (cDNA) sequence. A cDNA sequence refers to the sequence of an mRNA transcript expressed as DNA bases (e.g., guanine, adenine, thymine, and cytosine) rather than RNA bases (e.g., guanine, adenine, uracil, and cytosine). Thus, the antisense strand of the RNAi constructs may comprise a region having a sequence that is substantially or fully complementary to a target FAM13A mRNA sequence or FAM13A cDNA sequence. A FAM13A mRNA or cDNA sequence can include, but is not limited to, any FAM13A mRNA or cDNA sequences in the Ensembl Genome or National Center for Biotechnology Information (NCBI) databases, including human sequences such as Ensembl transcript no. ENST00000264344.9 (SEQ ID NO: 1) and NCBI Reference sequence NM_022746.4. A FAM13A mRNA or cDNA sequence can also include cynomolgus monkey sequences, rhesus monkey sequences, chimpanzee sequences, rat sequences, and mouse sequences. In certain embodiments, the FAM13A mRNA sequence is the human transcript set forth below (SEQ ID NO: 1).

CCTTCCAGCCATGTGGGTTCAGCGGAAAGAGAAGCAAAACCACTCTTCCTAAAATGTTAGAA
GCTGCTCTTCGCTTACCTTGGGGCCTTTGCATTGGGAGCTGTTTTTCACATCAAAGAATATG
TGCTGAATGGAATTTTAGTATTTTGCTGTCGTTTTAATATTTTCGTCTGGTCTTCCTCAGTT
CTTCCAGACGCTTTCTGAGAGAATGGGGGCAGGAGCTCTAGCCATCTGTCAAAGTAAAGCAG
CGGTTCGGCTGAAAGAAGACATGAAAAAGATAGTGGCAGTGCCATTAAATGAACAGAAGGAT
TTTACCTATCAGAAGTTATTTGGAGTCAGTCTCCAAGAACTTGAACGGCAGGGGCTCACCGA
GAATGGCATTCCAGCAGTAGTGTGGAATATAGTGGAATATTTGACGCAGCATGGACTTACCC
AAGAAGGTCTTTTTAGGGTGAATGGTAACGTGAAGGTGGTGGAACAACTTCGACTGAAGTTC
GAGAGTGGAGTGCCCGTGGAGCTCGGGAAGGACGGTGATGTCTGCTCAGCAGCCAGTCTGTT
GAAGCTGTTTCTGAGGGAGCTGCCTGACAGTCTGATCACCTCAGCGTTGCAGCCTCGATTCA
TTCAACTCTTTCAGGATGGCAGAAATGATGTTCAGGAGAGTAGCTTAAGAGACTTAATAAAA
GAGCTGCCAGACACCCACTACTGCCTCCTCAAGTACCTTTGCCAGTTCTTGACAAAAGTAGC
CAAGCATCATGTGCAGAATCGCATGAATGTTCACAATCTCGCCACTGTATTTGGGCCAAATT
GCTTTCATGTGCCACCTGGGCTTGAAGGCATGAAGGAACAGGACCTGTGCAACAAGATAATG
GCTAAAATTCTAGAAAATTACAATACCCTGTTTGAAGTAGAGTATACAGAAAATGATCATCT
GAGATGTGAAAACCTGGCTAGGCTTATCATAGTAAAAGAGGTCTATTATAAGAACTCCCTGC
CCATCCTTTTAACAAGAGGCTTAGAAAGAGACATGCCAAAACCACCTCCAAAAACCAAGATC
CCAAAATCCAGGAGTGAGGGATCTATTCAGGCCCACAGAGTACTGCAACCAGAGCTATCTGA
TGGCATTCCTCAGCTCAGCTTGCGGCTAAGTTATAGAAAAGCCTGCTTGGAAGACATGAATT
CAGCAGAGGGTGCTATTAGTGCCAAGTTGGTACCCAGTTCACAGGAAGATGAAAGACCTCTG
TCACCTTTCTATTTGAGTGCTCATGTACCCCAAGTCAGCAATGTGTCTGCAACCGGAGAACT
CTTAGAAAGAACCATCCGATCAGCTGTAGAACAACATCTTTTTGATGTTAATAACTCTGGAG
GTCAAAGTTCAGAGGACTCAGAATCTGGAACACTATCAGCATCTTCTGCCACATCTGCCAGA
CAGCGCCGCCGCCAGTCCAAGGAGCAGGATGAAGTTCGACATGGGAGAGACAAGGGACTTAT
CAACAAAGAAAATACTCCTTCTGGGTTCAACCACCTTGATGATTGTATTTTGAATACTCAGG
AAGTCGAAAAGGTACACAAAAATACTTTTGGTTGTGCTGGAGAAAGGAGCAAGCCTAAACGT
CAGAAATCCAGTACTAAACTTTCTGAGCTTCATGACAATCAGGACGGTCTTGTGAATATGGA
AAGTCTCAATTCCACACGATCTCATGAGAGAACTGGACCTGATGATTTTGAATGGATGTCTG
ATGAAAGGAAAGGAAATGAAAAAGATGGTGGACACACTCAGCATTTTGAGAGCCCCACAATG
AAGATCCAGGAGCATCCCAGCCTATCTGACACCAAACAGCAGAGAAATCAAGATGCCGGTGA
CCAGGAGGAGAGCTTTGTCTCCGAAGTGCCCCAGTCGGACCTGACTGCATTGTGTGATGAAA
AGAACTGGGAAGAGCCTATCCCTGCTTTCTCCTCCTGGCAGCGGGAGAACAGTGACTCTGAT
GAAGCCCACCTCTCGCCGCAGGCTGGGCGCCTGATCCGTCAGCTGCTGGACGAAGACAGCGA
CCCCATGCTCTCTCCTCGGTTCTACGCTTATGGGCAGAGCAGGCAATACCTGGATGACACAG
AAGTGCCTCCTTCCCCACCAAACTCCCATTCTTTCATGAGGCGGCGAAGCTCCTCTCTGGGG
TCCTATGATGATGAGCAAGAGGACCTGACACCTGCCCAGCTCACACGAAGGATTCAGAGCCT
TAAAAAGAAGATCCGGAAGTTTGAAGATAGATTCGAAGAAGAGAAGAAGTACAGACCTTCCC
ACAGTGACAAAGCAGCCAATCCGGAGGTTCTGAAATGGACAAATGACCTTGCCAAATTCCGG
AGACAACTTAAAGAATCAAAACTAAAGATATCTGAAGAGGACCTAACTCCCAGGATGCGGCA
GCGAAGCAACACACTCCCCAAGAGTTTTGGTTCCCAACTTGAGAAAGAAGATGAGAAGAAGC
AAGAGCTGGTGGATAAAGCAATAAAGCCCAGTGTTGAAGCCACATTGGAATCTATTCAGAGG
AAGCTCCAGGAGAAGCGAGCGGAAAGCAGCCGCCCTGAGGACATTAAGGATATGACCAAAGA
CCAGATTGCTAATGAGAAAGTGGCTCTGCAGAAAGCTCTGTTATATTATGAAAGCATTCATG
GACGGCCGGTAACAAAGAACGAACGGCAGGTGATGAAGCCACTATACGACAGGTACCGGCTG
GTCAAACAGATCCTCTCCCGAGCTAACACCATACCCATCATTGGTTCCCCCTCCAGCAAGCG
GAGAAGCCCTTTGCTGCAGCCAATTATCGAGGGCGAAACTGCTTCCTTCTTCAAGGAGATAA
AGGAAGAAGAGGAGGGGTCAGAAGACGATAGCAATGTGAAGCCAGACTTCATGGTCACTCTG
AAAACCGATTTCAGTGCACGATGCTTTCTGGACCAATTCGAAGATGACGCTGATGGATTTAT
TTCCCCAATGGATGATAAAATACCATCAAAATGCAGCCAGGACACAGGGCTTTCAAATCTCC
ATGCTGCCTCAATACCTGAACTCCTGGAACACCTCCAGGAAATGAGAGAAGAAAAGAAAAGG
ATTCGAAAGAAACTTCGGGATTTTGAAGACAACTTTTTCAGACAGAATGGAAGAAATGTCCA
GAAGGAAGACCGCACTCCTATGGCTGAAGAATACAGTGAATATAAGCACATAAAGGCGAAAC
TGAGGCTCCTGGAGGTGCTCATCAGCAAGAGAGACACTGATTCCAAGTCCATGTGAGGGGCA
TGGCCAAGCACAGGGGGCTGGCAGCTGCGGTGAGAGTTTACTGTCCCCAGAGAAAGTGCAGC
TCTGGAAGGCAGCCTTGGGGCTGGCCCTGCAAAGCATGCAGCCCTTCTGCCTCTAGACCATT
TGGCATCGGCTCCTGTTTCCATTGCCTGCCTTAGAAACTGGCTGGAAGAAGACAATGTGACC
TGACTTAGGCATTTTGTAATTGGAAAGTCAAGACTGCAGTATGTGCACATGCGCACGCGCAT
GCACGCACACACACACACAGTAGTGGAGCTTTCCTAACACTAGCAGAGATTAATCACTACAT
TAGACAACACTCATCTACAGAGAATATACACTGTTCTTCCCTGGATAACTGAGAAACAAGAG
ACCATTCTCTGTCTAACTGTGATAAAAACAAGCTCAGGACTTTATTCTATAGAGCAAACTTG
CTGTGGAGGGCCATGCTCTCCTTGGACCCAGTTAACTGCAAACGTGCATTGGAGCCCTATTT
GCTGCCGCTGCCATTCTAGTGACCTTTCCACAGAGCTGCGCCTTCCTCACGTGTGTGAAAGG
TTTTCCCCTTCAGCCCTCAGGTAGATGGAAGCTGCATCTGCCCACGATGGCAGTGCAGTCAT
CATCTTCAGGATGTTTCTTCAGGACTTCCTCAGCTGACAAGGAATTTTGGTCCCTGCCTAGG
ACCGGGTCATCTGCAGAGGACAGAGAGATGGTAAGCAGCTGTATGAATGCTGATTTTAAAAC
CAGGTCATGGGAGAAGAGCCTGGAGATTCTTTCCTGAACACTGACTGCACTTACCAGTCTGA
TTTTATCGTCAAACACCAAGCCAGGCTAGCATGCTCATGGCAATCTGTTTGGGGCTGTTTTG
TTGTGGCACTAGCCAAACATAAAGGGGCTTAAGTCAGCCTGCATACAGAGGATCGGGGAGAG
AAGGGGCCTGTGTTCTCAGCCTCCTGAGTACTTACCAGAGTTTAATTTTTTTAAAAAAAATC
TGCACTAAAATCCCCAAACTGACAGGTAAATGTAGCCCTCAGAGCTCAGCCCAAGGCAGAAT
CTAAATCACACTATTTTCGAGATCATGTATAAAAAGAAAAAAAAGAAGTCATGCTGTGTGGC
CAATTATAATTTTTTTCAAAGACTTTGTCACAAAACTGTCTATATTAGACATTTTGGAGGGA
CCAGGAAATGTAAGACACCAAATCCTCCATCTCTTCAGTGTGCCTGATGTCACCTCATGATT
TGCTGTTACTTTTTTAACTCCTGCGCCAAGGACAGTGGGTTCTGTGTCCACCTTTGTGCTTT
GCGAGGCCGAGCCCAGGCATCTGCTCGCCTGCCACGGCTGACCAGAGAAGGTGCTTCAGGAG
CTCTGCCTTAGACGACGTGTTACAGTATGAACACACAGCAGAGGCACCCTCGTATGTTTTGA
AAGTTGCCTTCTGAAAGGGCACAGTTTTAAGGAAAAGAAAAAGAATGTAAAACTATACTGAC
CCGTTTTCAGTTTTAAAGGGTCGTGAGAAACTGGCTGGTCCAATGGGATTTACAGCAACATT
TTCCATTGCTGAAGTGAGGTAGCAGCTCTCTTCTGTCAGCTGAATGTTAAGGATGGGGAAAA
AGAATGCCTTTAAGTTTGCTCTTAATCGTATGGAAGCTTGAGCTATGTGTTGGAAGTGCCCT
GGTTTTAATCCATACACAAAGACGGTACATAATCCTACAGGTTTAAATGTACATAAAAATAT
AGTTTGGAATTCTTTGCTCTACTGTTTACATTGCAGATTGCTATAATTTCAAGGAGTGAGAT
TATAAATAAAATGATGCACTTTAGGATGTTTCCTATTTTTGAAATCTGAACATGAATCATTC
ACATGACCAAAAATTGTGTTTTTTTAAAAATACATGTCTAGTCTGTCCTTTAATAGCTCTCT
TAAATAAGCTATGATATTAATCAGATCATTACCAGTTAGCTTTTAAAGCACATTTGTTTAAG
ACTATGTTTTTGGAAAAATACGCTACAGAATTTTTTTTTAAGCTACAAATAAATGAGATGCT
ACTAATTGTTTTGGAATCTGTTGTTTCTGCCAAAGGTAAATTAACTAAAGATTTATTCAGGA
ATCCCCATTTGAATTTGTATGATTCAATAAAAGAAAACACCAAGTAAGTTATATAAAATAAA
TTGTGTATGAGATGTTGTGTTTTCCTTTGTAATTTCCACTAACTAACTAACTAACTTATATT
CTTCATGGAATGGAGCCCAGAAGAAATGAGAGGAAGCCCTTTTCACACTAGATCTTATTTGA
AGAAATGTTTGTTAGTCAGTCAGTCAGTGGTTTCTGGCTCTGCCGAGGGAGATGTGTTCCCC
AGCAACCATTTCTGCAGCCCAGAATCTCAAGGCACTAGAGGCGGTGTCTTAATTAATTGGCT
TCACAAAGACAAAATGCTCTGGACTGGGATTTTTCCTTTGCTGTGTTGGGAATATGTGTTTA
TTAATTAGCACATGCCAACAAAATAAATGTCAAGAGTTATTTCATAAGTGTAAGTAAACTTA
AGAATTAAAGAGTGCAGACTTATAATTTTC

[0035] A region of the antisense strand can be substantially complementary or fully complementary to at least 15 consecutive nucleotides of the FAM13A mRNA sequence. In certain embodiments, the region of the antisense strand comprises a sequence that is substantially complementary to the sequence of at least 15, at least 16, at least 17, at least 18, or at least 19 contiguous nucleotides of a region of the FAM13A mRNA sequence (e.g., a human FAM13A mRNA sequence (SEQ ID NO: 1)) with no more than 1, 2, or 3 mismatches. In related embodiments, the antisense strand comprises a region having a sequence that is substantially complementary to the sequence of at least 15, at least 16, at least 17, at least 18, or at least 19 contiguous nucleotides of a region of the FAM13A mRNA sequence with no more than 1 mismatch. In some embodiments, the target region of the FAM13A mRNA sequence to which the antisense strand comprises a region of complementarity can range from about 15 to about 30 consecutive nucleotides, from about 16 to about 28 consecutive nucleotides, from about 18 to about 26 consecutive nucleotides, from about 17 to about 24 consecutive nucleotides, from about 19 to about 30 consecutive nucleotides, from about 19 to about 25 consecutive nucleotides, from about 19 to about 23 consecutive nucleotides, or from about 19 to about 21 consecutive nucleotides. In certain embodiments, the region of the antisense strand comprising a sequence that is substantially or fully complementary to a FAM13A mRNA sequence may comprise at least 15 contiguous nucleotides from an antisense sequence listed in Table 1 or Table 2. In other embodiments, the sequence of the antisense strand comprises at least 16, at least 17, at least 18, or at least 19 contiguous nucleotides from an antisense sequence listed in Table 1 or Table 2.

[0036] In some embodiments, the region of the antisense strand comprising a sequence that is substantially or fully complementary to a FAM13A mRNA sequence may comprise at least 15 contiguous nucleotides from a region that is particularly susceptible to being targeted by a RNAi construct. Therefore, in some embodiments, the region of the antisense strand comprising a sequence that is substantially or fully complementary to a FAM13A mRNA sequence may comprise at least 15 contiguous nucleotides from within nucleotides 1300-1375, 1625-1700, 2075-2175, or 4900-5300 of the human FAM13A mRNA sequence set forth in SEQ ID NO: 1. In some embodiments, the region of the antisense strand comprising a sequence that is substantially or fully complementary to a FAM13A mRNA sequence may comprise at least 15 contiguous nucleotides from a sub-section of these regions. Therefore, in some embodiments, the sequence may comprise at least 15 contiguous nucleotides from nucleotides 1300-1350, 4900-5275, 4900-5250, 4900-5225, 4900-5200, 4900-5175, 4900-5150, 4900-5125, 4900-5100, 4900-5075, 4925-5300, 4925-5275, 4925-5250, 4925-5225, 4925-5200, 4925-5175, 4925-5150, 4925-5125, 4925-5100, 4925-5075, 4950-5300, 4950-5275, 4950-5250, 4950-5225, 4950-5200, 4950-5175, 4950-5150, 4950-5125, 4950-5100, 4950-5075, 4975-5300, 4975-5275, 4975-5250, 4975-5225, 4975-5200, 4975-5175, 4975-5150, 4975-5125, 4975-5100, 4975-5075, 5175-3000, 5100-5300, 5125-5300, 5150-5300, 5175-5300, 5200-5300, or 5225-5300.

[0037] The sense strand of the RNAi construct typically comprises a sequence that is sufficiently complementary to the sequence of the antisense strand such that the two strands hybridize under physiological conditions to form a duplex region. A “duplex region” refers to the region in two complementary or substantially complementary polynucleotides that form base pairs with one another, either by Watson-Crick base pairing or other hydrogen bonding interaction, to create a duplex between the two polynucleotides. The duplex region of the RNAi construct should be of sufficient length to allow the RNAi construct to enter the RNA interference pathway, e.g., by engaging the Dicer enzyme and/or the RISC complex. For instance, in some embodiments, the duplex region is about 15 to about 30 base pairs in length. Other lengths for the duplex region within this range are also suitable, such as about 15 to about 28 base pairs, about 15 to about 26 base pairs, about 15 to about 24 base pairs, about 15 to about 22 base pairs, about 17 to about 28 base pairs, about 17 to about 26 base pairs, about 17 to about 24 base pairs, about 17 to about 23 base pairs, about 17 to about 21 base pairs, about 19 to about 25 base pairs, about 19 to about 23 base pairs, or about 19 to about 21 base pairs. In certain embodiments, the duplex region is about 17 to about 24 base pairs in length. In other embodiments, the duplex region is about 19 to about 21 base pairs in length. In one embodiment, the duplex region is about 19 base pairs in length. In another embodiment, the duplex region is about 21 base pairs in length.

[0038] For embodiments in which the sense strand and antisense strand are two separate molecules (e.g., RNAi construct comprises an siRNA), the sense strand and antisense strand need not be the same length as the length of the duplex region. For instance, one or both strands may be longer than the duplex region and have one or more unpaired nucleotides or mismatches flanking the duplex region. Thus, in some embodiments, the RNAi construct comprises at least one nucleotide overhang. As used herein, a “nucleotide overhang” refers to the unpaired nucleotide or nucleotides that extend beyond the duplex region at the terminal ends of the strands. Nucleotide overhangs are typically created when the 3′ end of one strand extends beyond the 5′ end of the other strand or when the 5′ end of one strand extends beyond the 3′ end of the other strand. The length of a nucleotide overhang is generally between 1 and 6 nucleotides, 1 and 5 nucleotides, 1 and 4 nucleotides, 1 and 3 nucleotides, 2 and 6 nucleotides, 2 and 5 nucleotides, or 2 and 4 nucleotides. In some embodiments, the nucleotide overhang comprises 1, 2, 3, 4, 5, or 6 nucleotides. In some embodiments, the nucleotide overhang comprises 1 to 4 nucleotides. In certain embodiments, the nucleotide overhang comprises 2 nucleotides. In certain other embodiments, the nucleotide overhang comprises a single nucleotide.

[0039] The nucleotides in the overhang can be ribonucleotides or modified nucleotides as described herein. In some embodiments, the nucleotides in the overhang are 2′-modified nucleotides (e.g., 2′-fluoro modified nucleotides, 2′-O-methyl modified nucleotides), deoxyribonucleotides, abasic nucleotides, inverted nucleotides (e.g., inverted abasic nucleotides, inverted deoxyribonucleotides), or combinations thereof. For instance, in one embodiment, the nucleotides in the overhang are deoxyribonucleotides, e.g., deoxythymidine. In another embodiment, the nucleotides in the overhang are 2′-O-methyl modified nucleotides, 2′-fluoro modified nucleotides, 2′-methoxyethyl modified nucleotides, or combinations thereof. In other embodiments, the overhang comprises a 5′-uridine-uridine-3′ (5′-UU-3′) dinucleotide. In such embodiments, the UU dinucleotide may comprise ribonucleotides or modified nucleotides, e.g., 2′-modified nucleotides. In other embodiments, the overhang comprises a 5′-deoxythymidine-deoxythymidine-3′ (5′-dTdT-3′) dinucleotide. When a nucleotide overhang is present in the antisense strand, the nucleotides in the overhang can be complementary to the target gene sequence, form a mismatch with the target gene sequence, or comprise some other sequence (e.g., polypyrimidine or polypurine sequence, such as UU, TT, AA, GG, etc.).

[0040] The nucleotide overhang can be at the 5′ end or 3′ end of one or both strands. For example, in one embodiment, the RNAi construct comprises a nucleotide overhang at the 5′ end and the 3′ end of the antisense strand. In another embodiment, the RNAi construct comprises a nucleotide overhang at the 5′ end and the 3′ end of the sense strand. In some embodiments, the RNAi construct comprises a nucleotide overhang at the 5′ end of the sense strand and the 5′ end of the antisense strand. In other embodiments, the RNAi construct comprises a nucleotide overhang at the 3′ end of the sense strand and the 3′ end of the antisense strand.

[0041] The RNAi constructs may comprise a single nucleotide overhang at one end of the double-stranded RNA molecule and a blunt end at the other. A “blunt end” means that the sense strand and antisense strand are fully base-paired at the end of the molecule and there are no unpaired nucleotides that extend beyond the duplex region. In some embodiments, the RNAi construct comprises a nucleotide overhang at the 3′ end of the sense strand and a blunt end at the 5′ end of the sense strand and 3′ end of the antisense strand. In other embodiments, the RNAi construct comprises a nucleotide overhang at the 3′ end of the antisense strand and a blunt end at the 5′ end of the antisense strand and the 3′ end of the sense strand. In certain embodiments, the RNAi construct comprises a blunt end at both ends of the double-stranded RNA molecule. In such embodiments, the sense strand and antisense strand have the same length and the duplex region is the same length as the sense and antisense strands (i.e., the molecule is double stranded over its entire length).

[0042] The sense strand and antisense strand in the RNAi constructs can each independently be about 15 to about 30 nucleotides in length, about 19 to about 30 nucleotides in length, about 18 to about 28 nucleotides in length, about 19 to about 27 nucleotides in length, about 19 to about 25 nucleotides in length, about 19 to about 23 nucleotides in length, about 19 to about 21 nucleotides in length, about 21 to about 25 nucleotides in length, or about 21 to about 23 nucleotides in length. In certain embodiments, the sense strand and antisense strand are each independently about 18, about 19, about 20, about 21, about 22, about 23, about 24, or about 25 nucleotides in length. In some embodiments, the sense strand and antisense strand have the same length but form a duplex region that is shorter than the strands such that the RNAi construct has two nucleotide overhangs. For instance, in one embodiment, the RNAi construct comprises (i) a sense strand and an antisense strand that are each 21 nucleotides in length, (ii) a duplex region that is 19 base pairs in length, and (iii) nucleotide overhangs of 2 unpaired nucleotides at both the 3′ end of the sense strand and the 3′ end of the antisense strand. In another embodiment, the RNAi construct comprises (i) a sense strand and an antisense strand that are each 23 nucleotides in length, (ii) a duplex region that is 21 base pairs in length, and (iii) nucleotide overhangs of 2 unpaired nucleotides at both the 3′ end of the sense strand and the 3′ end of the antisense strand. In other embodiments, the sense strand and antisense strand have the same length and form a duplex region over their entire length such that there are no nucleotide overhangs on either end of the double-stranded molecule. In one such embodiment, the RNAi construct is blunt ended (e.g., has two blunt ends) and comprises (i) a sense strand and an antisense strand, each of which is 21 nucleotides in length, and (ii) a duplex region that is 21 base pairs in length. In another such embodiment, the RNAi construct is blunt ended (e.g., has two blunt ends) and comprises (i) a sense strand and an antisense strand, each of which is 23 nucleotides in length, and (ii) a duplex region that is 23 base pairs in length. In still another such embodiment, the RNAi construct is blunt ended (e.g., has two blunt ends) and comprises (i) a sense strand and an antisense strand, each of which is 19 nucleotides in length, and (ii) a duplex region that is 19 base pairs in length.

[0043] In other embodiments, the sense strand or the antisense strand is longer than the other strand and the two strands form a duplex region having a length equal to that of the shorter strand such that the RNAi construct comprises at least one nucleotide overhang. For example, in one embodiment, the RNAi construct comprises (i) a sense strand that is 19 nucleotides in length, (ii) an antisense strand that is 21 nucleotides in length, (iii) a duplex region of 19 base pairs in length, and (iv) a nucleotide overhang of 2 unpaired nucleotides at the 3′ end of the antisense strand. In another embodiment, the RNAi construct comprises (i) a sense strand that is 21 nucleotides in length, (ii) an antisense strand that is 23 nucleotides in length, (iii) a duplex region of 21 base pairs in length, and (iv) a nucleotide overhang of 2 unpaired nucleotides at the 3′ end of the antisense strand.

[0044] The antisense strand of the RNAi constructs can comprise or consist of the sequence of any one of the antisense sequences listed in Table 1 or Table 2, the sequence of nucleotides 1-19 of any of these antisense sequences, or the sequence of nucleotides 2-19 of any of these antisense sequences. Thus, in some embodiments, the antisense strand comprises or consists of a sequence selected from SEQ ID NOs: 546-1089 or 1938-2785. In other embodiments, the antisense strand comprises or consists of a sequence of nucleotides 1-19 of any one of SEQ ID NOs: 546-1089 or 1938-2785. In still other embodiments, the antisense strand comprises or consists of a sequence of nucleotides 2-19 of any one of SEQ ID NOs: 546-1089 or 1938-2785.

[0045] In these and other embodiments, the sense strand of the RNAi constructs can comprise or consist of the sequence of any one of the sense sequences listed in Table 1 or Table 2, the sequence of nucleotides 1-19 of any of these sense sequences, or the sequence of nucleotides 2-19 of any of these sense sequences. Thus, in some embodiments, the sense strand comprises or consists of a sequence selected from SEQ ID NOs: 2-545 or 1090-1937. In other embodiments, the sense strand comprises or consists of a sequence of nucleotides 1-19 of any one of SEQ ID NOs: 2-545 or 1090-1937. In still other embodiments, the sense strand comprises or consists of a sequence of nucleotides 2-19 of any one of SEQ ID NOs: 2-545 or 1090-1937.

[0046] In certain embodiments, the RNAi constructs comprise (i) a sense strand comprising or consisting of a sequence selected from 2-545 or 1090-1937 and (ii) an antisense strand comprising or consisting of a sequence selected from SEQ ID NOs: 546-1089 or 1938-2785. In some embodiments, the RNAi construct can be any of the duplex compounds listed in Table 1 or Table 2 (including the unmodified nucleotide sequences and/or modified nucleotide sequences of the compounds). In certain embodiments, the RNAi construct is D-1539, D-1544, D-1545, D-1549, D-1557, D-1559, D-1573, D-1579, D-1586, D-1597, D-1607, D-1611, D-1612, D-1614, D-1623, D-1631, D-1636, D-1639, D-1640, D-1643, D-1644, D-1645, D-1646, D-1648, D-1652, D-1661, D-1667, D-1672, or D-1694.

### Modification and Preparation of RNAi Constructs

[0047] The RNAi constructs disclosed herein may comprise one or more modified nucleotides. A “modified nucleotide” refers to a nucleotide that has one or more chemical modifications to the nucleoside, nucleobase, pentose ring, or phosphate group. As used herein, modified nucleotides do not encompass ribonucleotides containing adenosine monophosphate, guanosine monophosphate, uridine monophosphate, and cytidine monophosphate. However, the RNAi constructs may comprise combinations of modified nucleotides and ribonucleotides. Incorporation of modified nucleotides into one or both strands of double-stranded RNA molecules can improve the in vivo stability of the RNA molecules, e.g., by reducing the molecules' susceptibility to nucleases and other degradation processes. The potency of RNAi constructs for reducing expression of the target gene can also be enhanced by incorporation of modified nucleotides.

[0048] In certain embodiments, the modified nucleotides have a modification of the ribose sugar. These sugar modifications can include modifications at the 2′ and/or 5′ position of the pentose ring as well as bicyclic sugar modifications. A 2′-modified nucleotide refers to a nucleotide having a pentose ring with a substituent at the 2′ position other than OH. Such 2′-modifications include, but are not limited to, 2′-H (e.g., deoxyribonucleotides), 2′-O-alkyl (e.g., —O—C₁-C₁₀ or —O—C₁-C₁₀ substituted alkyl), 2′-O-allyl (—O—CH₂CH═CH₂), 2′-C-allyl, 2′-deoxy-2′-fluoro (also referred to as 2′-F or 2′-fluoro), 2′-O-methyl (—OCH₃), 2′-O-methoxyethyl (—O—(CH₂)₂OCH₃), 2′-OCF₃, 2′-O(CH₂)₂SCH₃, 2′-O-aminoalkyl, 2′-amino (e.g., —NH₂), 2′-O-ethylamine, and 2′-azido. Modifications at the 5′ position of the pentose ring include, but are not limited to, 5′-methyl (R or S configuration); 5′-vinyl, and 5′-methoxy.

[0049] A “bicyclic sugar modification” refers to a modification of the pentose ring where a bridge connects two atoms of the ring to form a second ring resulting in a bicyclic sugar structure. In some embodiments the bicyclic sugar modification comprises a bridge between the 4′ and 2′ carbons of the pentose ring. Nucleotides comprising a sugar moiety with a bicyclic sugar modification are referred to herein as bicyclic nucleic acids or BNAs. Exemplary bicyclic sugar modifications include, but are not limited to, α-L-Methyleneoxy (4′-CH₂—O-2′) bicyclic nucleic acid (BNA); β-D-Methyleneoxy (4′-CH₂—O-2′) BNA (also referred to as a locked nucleic acid or LNA); Ethyleneoxy (4′-(CH₂)₂—O-2′) BNA; Aminooxy (4′-CH₂—O—N(R)-2′, wherein R is H, C₁-C₁₂ alkyl, or a protecting group) BNA; Oxyamino (4′-CH₂—N(R)—O-2′, wherein R is H, C₁-C₁₂ alkyl, or a protecting group) BNA; Methyl(methyleneoxy) (4′-CH(CH₃)—O-2′) BNA (also referred to as constrained ethyl or cEt); methylene-thio (4′-CH₂—S-2′) BNA; methylene-amino (4′-CH2-N(R)-2′, wherein R is H, C₁-C₁₂ alkyl, or a protecting group) BNA; methyl carbocyclic (4′-CH₂—CH(CH₃)-2′) BNA; propylene carbocyclic (4′-(CH₂)₃-2′) BNA; and Methoxy(ethyleneoxy) (4′-CH(CH₂OMe)-O-2′) BNA (also referred to as constrained MOE or cMOE). These and other sugar-modified nucleotides that can be incorporated into the RNAi constructs are described in U.S. Pat. No. 9,181,551, U.S. Patent Publication No. 2016/0122761, and Deleavey and Damha, Chemistry and Biology, Vol. 19: 937-954, 2012, all of which are hereby incorporated by reference in their entireties.

[0050] In some embodiments, the RNAi constructs comprise one or more 2′-fluoro modified nucleotides, 2′-O-methyl modified nucleotides, 2′-O-methoxyethyl modified nucleotides, 2′-O-alkyl modified nucleotides, 2′-O-allyl modified nucleotides, bicyclic nucleic acids (BNAs), deoxyribonucleotides, or combinations thereof. In certain embodiments, the RNAi constructs comprise one or more 2′-fluoro modified nucleotides, 2′-O-methyl modified nucleotides, 2′-O-methoxyethyl modified nucleotides, or combinations thereof. In some embodiments, the RNAi constructs comprise one or more 2′-fluoro modified nucleotides, 2′-O-methyl modified nucleotides or combinations thereof.

[0051] Both the sense and antisense strands of the RNAi constructs can comprise one or multiple modified nucleotides. For instance, in some embodiments, the sense strand comprises 1, 2, 3, 4, 5, 6, 7, 8, 9, 10 or more modified nucleotides. In certain embodiments, all nucleotides in the sense strand are modified nucleotides. In some embodiments, the antisense strand comprises 1, 2, 3, 4, 5, 6, 7, 8, 9, 10 or more modified nucleotides. In other embodiments, all nucleotides in the antisense strand are modified nucleotides. In certain other embodiments, all nucleotides in the sense strand and all nucleotides in the antisense strand are modified nucleotides. In these and other embodiments, the modified nucleotides can be 2′-fluoro modified nucleotides, 2′-O-methyl modified nucleotides, or combinations thereof.

[0052] In certain embodiments, the modified nucleotides incorporated into one or both strands of the RNAi constructs have a modification of the nucleobase (also referred to herein as “base”). A “modified nucleobase” or “modified base” refers to a base other than the naturally occurring purine bases adenine (A) and guanine (G) and pyrimidine bases thymine (T), cytosine (C), and uracil (U). Modified nucleobases can be synthetic or naturally occurring modifications and include, but are not limited to, universal bases, 5-methylcytosine (5-me-C), 5-hydroxymethyl cytosine, xanthine (X), hypoxanthine (I), 2-aminoadenine, 6-methyladenine, 6-methylguanine, and other alkyl derivatives of adenine and guanine, 2-propyl and other alkyl derivatives of adenine and guanine, 2-thiouracil, 2-thiothymine and 2-thiocytosine, 5-halouracil and cytosine, 5-propynyl uracil and cytosine, 6-azo uracil, cytosine and thymine, 5-uracil (pseudouracil), 4-thiouracil, 8-halo, 8-amino, 8-thiol, 8-thioalkyl, 8-hydroxyl and other 8-substituted adenines and guanines, 5-halo, particularly 5-bromo, 5-trifluoromethyl and other 5-substituted uracils and cytosines, 7-methylguanine and 7-methyladenine, 8-azaguanine and 8-azaadenine, 7-deazaguanine and 7-deazaadenine and 3-deazaguanine and 3-deazaadenine.

[0053] In some embodiments, the modified base is a universal base. A “universal base” refers to a base analog that indiscriminately forms base pairs with all the natural bases in RNA and DNA without altering the double helical structure of the resulting duplex region. Universal bases are known to those of skill in the art and include, but are not limited to, inosine, C-phenyl, C-naphthyl and other aromatic derivatives, azole carboxamides, and nitroazole derivatives, such as 3-nitropyrrole, 4-nitroindole, 5-nitroindole, and 6-nitroindole.

[0054] Other suitable modified bases that can be incorporated into the RNAi constructs include those described in Herdewijn, Antisense Nucleic Acid Drug Dev., Vol. 10: 297-310, 2000 and Peacock et al., J. Org. Chem., Vol. 76: 7295-7300, 2011, both of which are hereby incorporated by reference in their entireties. The skilled person understands guanine, cytosine, adenine, thymine, and uracil may be replaced by other nucleobases, such as the modified nucleobases described above, without substantially altering the base pairing properties of a polynucleotide comprising a nucleotide bearing such replacement nucleobase.

[0055] In some embodiments, the sense and antisense strands of the RNAi constructs may comprise one or more abasic nucleotides. An “abasic nucleotide” or “abasic nucleoside” is a nucleotide or nucleoside that lacks a nucleobase at the 1′ position of the ribose sugar. In certain embodiments, the abasic nucleotides are incorporated into the terminal ends of the sense and/or antisense strands of the RNAi constructs. In one embodiment, the sense strand comprises an abasic nucleotide as the terminal nucleotide at its 3′ end, its 5′ end, or both its 3′ and 5′ ends. In another embodiment, the antisense strand comprises an abasic nucleotide as the terminal nucleotide at its 3′ end, its 5′ end, or both its 3′ and 5′ ends. In such embodiments in which the abasic nucleotide is a terminal nucleotide, it may be an inverted nucleotide—that is, linked to the adjacent nucleotide through a 3′-3′ internucleotide linkage (when on the 3′ end of a strand) or through a 5′-5′ internucleotide linkage (when on the 5′ end of a strand) rather than the natural 3′-5′ internucleotide linkage. Abasic nucleotides may also comprise a sugar modification, such as any of the sugar modifications described above. In certain embodiments, abasic nucleotides comprise a 2′-modification, such as a 2′-fluoro modification, 2′-O-methyl modification, or a 2′-H (deoxy) modification. In one embodiment, the abasic nucleotide comprises a 2′-O-methyl modification. In another embodiment, the abasic nucleotide comprises a 2′-H modification (i.e., a deoxy abasic nucleotide).

[0056] In certain embodiments, the RNAi constructs may comprise modified nucleotides incorporated into the sense and antisense strands according to a particular pattern, such as the patterns described in WIPO Publication No. WO 2020/123410, which is hereby incorporated by reference in its entirety. RNAi constructs having such chemical modification patterns have been shown to have improved gene silencing activity in vivo. In one embodiment, the RNAi construct comprises a sense strand and an antisense strand that comprise sequences that are sufficiently complementary to each other to form a duplex region of at least 15 base pairs, wherein:
[0057] nucleotides at positions 2, 7, and 14 in the antisense strand (counting from the 5′ end) are 2′-fluoro modified nucleotides;
[0058] nucleotides in the sense strand at positions paired with positions 8 to 11 and 13 in the antisense strand (counting from the 5′ end) are 2′-fluoro modified nucleotides; and
[0059] neither the sense strand nor the antisense strand each have more than 7 total 2′-fluoro modified nucleotides.

[0060] In other embodiments, the RNAi construct comprises a sense strand and an antisense strand that comprise sequences that are sufficiently complementary to each other to form a duplex region of at least 19 base pairs, wherein:
[0061] nucleotides at positions 2, 7, and 14 in the antisense strand (counting from the 5′ end) are 2′-fluoro modified nucleotides, nucleotides at positions 4, 6, 10, and 12 (counting from the 5′ end) are optionally 2′-fluoro modified nucleotides, and all other nucleotides in the antisense strand are modified nucleotides other than 2′-fluoro modified nucleotides; and
[0062] nucleotides in the sense strand at positions paired with positions 8 to 11 and 13 in the antisense strand (counting from the 5′ end) are 2′-fluoro modified nucleotides, nucleotides in the sense strand at positions paired with positions 3 and 5 in the antisense strand (counting from the 5′ end) are optionally 2′-fluoro modified nucleotides; and all other nucleotides in the sense strand are modified nucleotides other than 2′-fluoro modified nucleotides.

[0063] In such embodiments, the modified nucleotides other than 2′-fluoro modified nucleotides can be selected from 2′-O-methyl modified nucleotides, 2′-O-methoxyethyl modified nucleotides, 2′-O-alkyl modified nucleotides, 2′-O-allyl modified nucleotides, BNAs, and deoxyribonucleotides. In these and other embodiments, the terminal nucleotide at the 3′ end, the 5′ end, or both the 3′ end and the 5′ end of the sense strand can be an abasic nucleotide or a deoxyribonucleotide. In such embodiments, the abasic nucleotide or deoxyribonucleotide may be inverted—i.e., linked to the adjacent nucleotide through a 3′-3′ internucleotide linkage (when on the 3′ end of a strand) or through a 5′-5′ internucleotide linkage (when on the 5′ end of a strand) rather than the natural 3′-5′ internucleotide linkage.

[0064] In any of the above-described embodiments, nucleotides at positions 2, 7, 12, and 14 in the antisense strand (counting from the 5′ end) are 2′-fluoro modified nucleotides. In other embodiments, nucleotides at positions 2, 4, 7, 12, and 14 in the antisense strand (counting from the 5′ end) are 2′-fluoro modified nucleotides. In yet other embodiments, nucleotides at positions 2, 4, 6, 7, 12, and 14 in the antisense strand (counting from the 5′ end) are 2′-fluoro modified nucleotides. In still other embodiments, nucleotides at positions 2, 4, 6, 7, 10, 12, and 14 in the antisense strand (counting from the 5′ end) are 2′-fluoro modified nucleotides. In alternative embodiments, nucleotides at positions 2, 7, 10, 12, and 14 in the antisense strand (counting from the 5′ end) are 2′-fluoro modified nucleotides. In certain other embodiments, nucleotides at positions 2, 4, 7, 10, 12, and 14 in the antisense strand (counting from the 5′ end) are 2′-fluoro modified nucleotides.

[0065] In any of the above-described embodiments, nucleotides in the sense strand at positions paired with positions 3, 8 to 11, and 13 in the antisense strand (counting from the 5′ end) are 2′-fluoro modified nucleotides. In some embodiments, nucleotides in the sense strand at positions paired with positions 5, 8 to 11, and 13 in the antisense strand (counting from the 5′ end) are 2′-fluoro modified nucleotides. In other embodiments, nucleotides in the sense strand at positions paired with positions 3, 5, 8 to 11, and 13 in the antisense strand (counting from the 5′ end) are 2′-fluoro modified nucleotides.

[0066] In some embodiments, the RNAi construct comprises a structure represented by Formula (A):

(A)
5′-(N_{A})ₓ N_{L} N_{L} N_{L} N_{L} N_{L} N_{L} N_{F} N_{L} N_{F} N_{F} N_{F} N_{F} N_{L} N_{L} N_{M}
N_{L} N_{M} N_{L} N_{T}(n)_{y}-3′
3′-(N_{B})_{z} N_{L} N_{L} N_{L} N_{L} N_{L} N_{F} N_{L} N_{M} N_{L} N_{M} N_{L} N_{L} N_{F} N_{M} N_{L}
N_{M} N_{L} N_{F} N_{L}-5′

[0067] In Formula (A), the top strand listed in the 5′ to 3′ direction is the sense strand and the bottom strand listed in the 3′ to 5′ direction is the antisense strand; each N_{F} represents a 2′-fluoro modified nucleotide; each N_{M} independently represents a modified nucleotide selected from a 2′-fluoro modified nucleotide, a 2′-O-methyl modified nucleotide, a 2′-O-methoxyethyl modified nucleotide, a 2′-O-alkyl modified nucleotide, a 2′-O-allyl modified nucleotide, a BNA, and a deoxyribonucleotide; each N_{L} independently represents a modified nucleotide selected from a 2′-O-methyl modified nucleotide, a 2′-O-methoxyethyl modified nucleotide, a 2′-O-alkyl modified nucleotide, a 2′-O-allyl modified nucleotide, a BNA, and a deoxyribonucleotide; and N_{T} represents a modified nucleotide selected from an abasic nucleotide, an inverted abasic nucleotide, an inverted deoxyribonucleotide, a 2′-O-methyl modified nucleotide, a 2′-O-methoxyethyl modified nucleotide, a 2′-O-alkyl modified nucleotide, a 2′-O-allyl modified nucleotide, a BNA, and a deoxyribonucleotide. X can be an integer from 0 to 4, provided that when x is 1, 2, 3, or 4, one or more of the N_{A} nucleotides is a modified nucleotide independently selected from an abasic nucleotide, an inverted abasic nucleotide, an inverted deoxyribonucleotide, a 2′-O-methyl modified nucleotide, a 2′-O-methoxyethyl modified nucleotide, a 2′-O-alkyl modified nucleotide, a 2′-O-allyl modified nucleotide, a BNA, and a deoxyribonucleotide. One or more of the N_{A} nucleotides can be complementary to nucleotides in the antisense strand. Y can be an integer from 0 to 4, provided that when y is 1, 2, 3, or 4, one or more n nucleotides are modified or unmodified overhang nucleotides that do not base pair with nucleotides in the antisense strand. Z can be an integer from 0 to 4, provided that when z is 1, 2, 3, or 4, one or more of the NB nucleotides is a modified nucleotide independently selected from a 2′-O-methyl modified nucleotide, a 2′-O-methoxyethyl modified nucleotide, a 2′-O-alkyl modified nucleotide, a 2′-O-allyl modified nucleotide, a BNA, and a deoxyribonucleotide. One or more of the NB nucleotides can be complementary to N_{A} nucleotides when present in the sense strand or can be overhang nucleotides that do not base pair with nucleotides in the sense strand.

[0068] In some embodiments in which the RNAi construct comprises a structure represented by Formula (A), there is a nucleotide overhang at the 3′ end of the sense strand—i.e., y is 1, 2, 3, or 4. In one such embodiment, y is 2. In embodiments in which there is an overhang of 2 nucleotides at the 3′ end of the sense strand (i.e., y is 2), x is 0 and z is 2 or x is 1 and z is 2. In other embodiments in which the RNAi construct comprises a structure represented by Formula (A), the RNAi construct comprises a blunt end at the 3′ end of the sense strand and the 5′ end of the antisense strand (i.e., y is 0). In such embodiments where there is no nucleotide overhang at the 3′ end of the sense strand (i.e., y is 0): (i) x is 2 and z is 4, (ii) x is 3 and z is 4, (iii) x is 0 and z is 2, (iv) x is 1 and z is 2, or (v) x is 2 and z is 2. In any of the embodiments in which x is greater than 0, the N_{A} nucleotide that is the terminal nucleotide at the 5′ end of the sense strand can be an inverted nucleotide, such as an inverted abasic nucleotide or an inverted deoxyribonucleotide.

[0069] In certain embodiments in which the RNAi construct comprises a structure represented by Formula (A), the N_{M} at positions 4 and 12 in the antisense strand counting from the 5′ end are each a 2′-fluoro modified nucleotide. In other embodiments, the N_{M} at positions 4, 6, and 12 in the antisense strand counting from the 5′ end are each a 2′-fluoro modified nucleotide. In yet other embodiments, the N_{M} at positions 4, 6, 10, and 12 in the antisense strand counting from the 5′ end are each a 2′-fluoro modified nucleotide. In alternative embodiments in which the RNAi construct comprises a structure represented by Formula (A), the N_{M} at positions 10 and 12 in the antisense strand counting from the 5′ end are each a 2′-fluoro modified nucleotide. In related embodiments, the N_{M} at positions 4, 10, and 12 in the antisense strand counting from the 5′ end are each a 2′-fluoro modified nucleotide. In other alternative embodiments in which the RNAi construct comprises a structure represented by Formula (A), the N_{M} at positions 4, 6, and 10 in the antisense strand counting from the 5′ end are each a 2′-O-methyl modified nucleotide, and the N_{M} at position 12 in the antisense strand counting from the 5′ end is a 2′-fluoro modified nucleotide. In some embodiments in which the RNAi construct comprises a structure represented by Formula (A), each N_{M} in the sense strand is a 2′-O-methyl modified nucleotide. In other embodiments, each N_{M} in the sense strand is a 2′-fluoro modified nucleotide. In still other embodiments in which the RNAi construct comprises a structure represented by Formula (A), each N_{M} in both the sense and antisense strands is a 2′-O-methyl modified nucleotide.

[0070] In any of the above-described embodiments in which the RNAi construct comprises a structure represented by Formula (A), each N_{L} in both the sense and antisense strands can be a 2′-O-methyl modified nucleotide. In these embodiments and any of the embodiments described above, N_{T} in Formula (A) can be an inverted abasic nucleotide, an inverted deoxyribonucleotide, or a 2′-O-methyl modified nucleotide.

[0071] In other embodiments, the RNAi construct comprises a structure represented by Formula (B):

(B)
5′-(N_{A})ₓ N_{L} N_{L} N_{L} N_{L} N_{M} N_{L} N_{F} N_{F} N_{F} N_{F} N_{L} N_{L} N_{L} N_{L} N_{L}
N_{L} N_{L} N_{L} N_{T} (n)_{y}-3′
3′-(N_{B})_{z} N_{L} N_{L} N_{L} N_{M} N_{L} N_{F} N_{L} N_{M} N_{L} N_{L} N_{N} N_{N} N_{N} N_{N} N_{L}
N_{M} N_{L} N_{F} N_{L}-5′

[0072] In Formula (B), the top strand listed in the 5′ to 3′ direction is the sense strand and the bottom strand listed in the 3′ to 5′ direction is the antisense strand; each N_{F} represents a 2′-fluoro modified nucleotide; each N_{M} independently represents a modified nucleotide selected from a 2′-fluoro modified nucleotide, a 2′-O-methyl modified nucleotide, a 2′-O-methoxyethyl modified nucleotide, a 2′-O-alkyl modified nucleotide, a 2′-O-allyl modified nucleotide, a BNA, and a deoxyribonucleotide; each N_{L} independently represents a modified nucleotide selected from a 2′-O-methyl modified nucleotide, a 2′-O-methoxyethyl modified nucleotide, a 2′-O-alkyl modified nucleotide, a 2′-O-allyl modified nucleotide, a BNA, and a deoxyribonucleotide; and N_{T} represents a modified nucleotide selected from an abasic nucleotide, an inverted abasic nucleotide, an inverted deoxyribonucleotide, a 2′-O-methyl modified nucleotide, a 2′-O-methoxyethyl modified nucleotide, a 2′-O-alkyl modified nucleotide, a 2′-O-allyl modified nucleotide, a BNA, and a deoxyribonucleotide. X can be an integer from 0 to 4, provided that when x is 1, 2, 3, or 4, one or more of the N_{A} nucleotides is a modified nucleotide independently selected from an abasic nucleotide, an inverted abasic nucleotide, an inverted deoxyribonucleotide, a 2′-O-methyl modified nucleotide, a 2′-O-methoxyethyl modified nucleotide, a 2′-O-alkyl modified nucleotide, a 2′-O-allyl modified nucleotide, a BNA, and a deoxyribonucleotide. One or more of the N_{A} nucleotides can be complementary to nucleotides in the antisense strand. Y can be an integer from 0 to 4, provided that when y is 1, 2, 3, or 4, one or more n nucleotides are modified or unmodified overhang nucleotides that do not base pair with nucleotides in the antisense strand. Z can be an integer from 0 to 4, provided that when z is 1, 2, 3, or 4, one or more of the NB nucleotides is a modified nucleotide independently selected from a 2′-O-methyl modified nucleotide, a 2′-O-methoxyethyl modified nucleotide, a 2′-O-alkyl modified nucleotide, a 2′-O-allyl modified nucleotide, a BNA, and a deoxyribonucleotide. One or more of the NB nucleotides can be complementary to N_{A} nucleotides when present in the sense strand or can be overhang nucleotides that do not base pair with nucleotides in the sense strand.

[0073] In some embodiments in which the RNAi construct comprises a structure represented by Formula (B), there is a nucleotide overhang at the 3′ end of the sense strand—i.e., y is 1, 2, 3, or 4. In one such embodiment, y is 2. In embodiments in which there is an overhang of 2 nucleotides at the 3′ end of the sense strand (i.e., y is 2), x is 0 and z is 2 or x is 1 and z is 2. In other embodiments in which the RNAi construct comprises a structure represented by Formula (B), the RNAi construct comprises a blunt end at the 3′ end of the sense strand and the 5′ end of the antisense strand (i.e., y is 0). In such embodiments where there is no nucleotide overhang at the 3′ end of the sense strand (i.e., y is 0): (i) x is 2 and z is 4, (ii) x is 3 and z is 4, (iii) x is 0 and z is 2, (iv) x is 1 and z is 2, or (v) x is 2 and z is 2. In any of the embodiments in which x is greater than 0, the N_{A} nucleotide that is the terminal nucleotide at the 5′ end of the sense strand can be an inverted nucleotide, such as an inverted abasic nucleotide or an inverted deoxyribonucleotide.

[0074] In certain embodiments in which the RNAi construct comprises a structure represented by Formula (B), the N_{M} at positions 4, 6, 8, 9, and 16 in the antisense strand counting from the 5′ end are each a 2′-fluoro modified nucleotide and the N_{M} at positions 7 and 12 in the antisense strand counting from the 5′ end are each a 2′-O-methyl modified nucleotide. In other embodiments, the N_{M} at positions 4 and 6 in the antisense strand counting from the 5′ end are each a 2′-fluoro modified nucleotide and the N_{M} at positions 7 to 9 in the antisense strand counting from the 5′ end are each a 2′-O-methyl modified nucleotide. In still other embodiments, the N_{M} at positions 4, 6, 8, 9, and 16 in the antisense strand counting from the 5′ end are each a 2′-O-methyl modified nucleotide and the N_{M} at positions 7 and 12 in the antisense strand counting from the 5′ end are each a 2′-fluoro modified nucleotide. In alternative embodiments in which the RNAi construct comprises a structure represented by Formula (B), the N_{M} at positions 4, 6, 8, 9, and 12 in the antisense strand counting from the 5′ end are each a 2′-O-methyl modified nucleotide and the N_{M} at positions 7 and 16 in the antisense strand counting from the 5′ end are each a 2′-fluoro modified nucleotide. In certain other embodiments in which the RNAi construct comprises a structure represented by Formula (B), the N_{M} at positions 7, 8, 9, and 12 in the antisense strand counting from the 5′ end are each a 2′-O-methyl modified nucleotide and the N_{M} at positions 4, 6, and 16 in the antisense strand counting from the 5′ end are each a 2′-fluoro modified nucleotide. In these and other embodiments in which the RNAi construct comprises a structure represented by Formula (B), the N_{M} in the sense strand is a 2′-fluoro modified nucleotide. In alternative embodiments, the N_{M} in the sense strand is a 2′-O-methyl modified nucleotide.

[0075] In any of the above-described embodiments in which the RNAi construct comprises a structure represented by Formula (B), each N_{L} in both the sense and antisense strands can be a 2′-O-methyl modified nucleotide. In these embodiments and any of the embodiments described above, N_{T} in Formula (B) can be an inverted abasic nucleotide, an inverted deoxyribonucleotide, or a 2′-O-methyl modified nucleotide.

[0076] The RNAi constructs may also comprise one or more modified internucleotide linkages. As used herein, the term “modified internucleotide linkage” refers to an internucleotide linkage other than the natural 3′ to 5′ phosphodiester linkage. In some embodiments, the modified internucleotide linkage is a phosphorous-containing internucleotide linkage, such as a phosphotriester, aminoalkylphosphotriester, an alkylphosphonate (e.g., methylphosphonate, 3′-alkylene phosphonate), a phosphinate, a phosphoramidate (e.g., 3′-amino phosphoramidate and aminoalkylphosphoramidate), a phosphorothioate, a chiral phosphorothioate, a phosphorodithioate, a thionophosphoramidate, a thionoalkylphosphonate, a thionoalkylphosphotriester, and a boranophosphate. In one embodiment, a modified internucleotide linkage is a 2′ to 5′ phosphodiester linkage. In other embodiments, the modified internucleotide linkage is a non-phosphorous-containing internucleotide linkage and thus can be referred to as a modified internucleoside linkage. Such non-phosphorous-containing linkages include, but are not limited to, morpholino linkages (formed in part from the sugar portion of a nucleoside); siloxane linkages (—O—Si(H)₂—O—); sulfide, sulfoxide and sulfone linkages; formacetyl and thioformacetyl linkages; alkene containing backbones; sulfamate backbones; methylenemethylimino (—CH₂—N(CH₃)—O—CH₂—) and methylenehydrazino linkages; sulfonate and sulfonamide linkages; amide linkages; and others having mixed N, O, S and CH₂ component parts. In one embodiment, the modified internucleoside linkage is a peptide-based linkage (e.g., aminoethylglycine) to create a peptide nucleic acid or PNA, such as those described in U.S. Pat. Nos. 5,539,082; 5,714,331; and 5,719,262. Other suitable modified internucleotide and internucleoside linkages that may be employed in the RNAi constructs are described in U.S. Pat. Nos. 6,693,187, 9,181,551, U.S. Patent Publication No. 2016/0122761, and Deleavey and Damha, Chemistry and Biology, Vol. 19: 937-954, 2012, all of which are hereby incorporated by reference in their entireties.

[0077] In certain embodiments, the RNAi constructs comprise one or more phosphorothioate internucleotide linkages. The phosphorothioate internucleotide linkages may be present in the sense strand, antisense strand, or both strands of the RNAi constructs. For instance, in some embodiments, the sense strand comprises 1, 2, 3, 4, 5, 6, 7, 8, or more phosphorothioate internucleotide linkages. In other embodiments, the antisense strand comprises 1, 2, 3, 4, 5, 6, 7, 8, or more phosphorothioate internucleotide linkages. In still other embodiments, both strands comprise 1, 2, 3, 4, 5, 6, 7, 8, or more phosphorothioate internucleotide linkages. The RNAi constructs can comprise one or more phosphorothioate internucleotide linkages at the 3′-end, the 5′-end, or both the 3′- and 5′-ends of the sense strand, the antisense strand, or both strands. For instance, in certain embodiments, the RNAi construct comprises about 1 to about 6 or more (e.g., about 1, 2, 3, 4, 5, 6 or more) consecutive phosphorothioate internucleotide linkages at the 3′-end of the sense strand, the antisense strand, or both strands. In other embodiments, the RNAi construct comprises about 1 to about 6 or more (e.g., about 1, 2, 3, 4, 5, 6 or more) consecutive phosphorothioate internucleotide linkages at the 5′-end of the sense strand, the antisense strand, or both strands. In some embodiments, the antisense strand comprises at least 1 but no more than 6 phosphorothioate internucleotide linkages and the sense strand comprises at least 1 but no more than 4 phosphorothioate internucleotide linkages. In other embodiments, the antisense strand comprises at least 1 but no more than 4 phosphorothioate internucleotide linkages and the sense strand comprises at least 1 but no more than 2 phosphorothioate internucleotide linkages.

[0078] In some embodiments, the RNAi construct comprises a single phosphorothioate internucleotide linkage between the terminal nucleotides at the 3′ end of the sense strand. In other embodiments, the RNAi construct comprises two consecutive phosphorothioate internucleotide linkages between the terminal nucleotides at the 3′ end of the sense strand. In one embodiment, the RNAi construct comprises a single phosphorothioate internucleotide linkage between the terminal nucleotides at the 3′ end of the sense strand and a single phosphorothioate internucleotide linkage between the terminal nucleotides at the 3′ end of the antisense strand. In another embodiment, the RNAi construct comprises two consecutive phosphorothioate internucleotide linkages between the terminal nucleotides at the 3′ end of the antisense strand (i.e., a phosphorothioate internucleotide linkage at the first and second internucleotide linkages at the 3′ end of the antisense strand). In another embodiment, the RNAi construct comprises two consecutive phosphorothioate internucleotide linkages between the terminal nucleotides at both the 3′ and 5′ ends of the antisense strand. In yet another embodiment, the RNAi construct comprises two consecutive phosphorothioate internucleotide linkages between the terminal nucleotides at both the 3′ and 5′ ends of the antisense strand and two consecutive phosphorothioate internucleotide linkages at the 5′ end of the sense strand. In still another embodiment, the RNAi construct comprises two consecutive phosphorothioate internucleotide linkages between the terminal nucleotides at both the 3′ and 5′ ends of the antisense strand and two consecutive phosphorothioate internucleotide linkages between the terminal nucleotides at the 3′ end of the sense strand. In another embodiment, the RNAi construct comprises two consecutive phosphorothioate internucleotide linkages between the terminal nucleotides at both the 3′ and 5′ ends of the antisense strand and two consecutive phosphorothioate internucleotide linkages between the terminal nucleotides at both the 3′ and 5′ ends of the sense strand (i.e., a phosphorothioate internucleotide linkage at the first and second internucleotide linkages at both the 5′ and 3′ ends of the antisense strand and a phosphorothioate internucleotide linkage at the first and second internucleotide linkages at both the 5′ and 3′ ends of the sense strand). In yet another embodiment, the RNAi construct comprises two consecutive phosphorothioate internucleotide linkages between the terminal nucleotides at both the 3′ and 5′ ends of the antisense strand and a single phosphorothioate internucleotide linkage between the terminal nucleotides at the 3′ end of the sense strand. In any of the embodiments in which one or both strands comprise one or more phosphorothioate internucleotide linkages, the remaining internucleotide linkages within the strands can be the natural 3′ to 5′ phosphodiester linkages. For instance, in some embodiments, each internucleotide linkage of the sense and antisense strands is selected from phosphodiester and phosphorothioate, wherein at least one internucleotide linkage is a phosphorothioate.

[0079] In embodiments in which the RNAi construct comprises a nucleotide overhang, two or more of the unpaired nucleotides in the overhang can be connected by a phosphorothioate internucleotide linkage. In certain embodiments, all the unpaired nucleotides in a nucleotide overhang at the 3′ end of the antisense strand and/or the sense strand are connected by phosphorothioate internucleotide linkages. In other embodiments, all the unpaired nucleotides in a nucleotide overhang at the 5′ end of the antisense strand and/or the sense strand are connected by phosphorothioate internucleotide linkages. In still other embodiments, all the unpaired nucleotides in any nucleotide overhang are connected by phosphorothioate internucleotide linkages.

[0080] Incorporation of a phosphorothioate internucleotide linkage introduces an additional chiral center at the phosphorous atom in the oligonucleotide and therefore creates a diastereomer pair (Rp and Sp) at each phosphorothioate internucleotide linkage. Diastereomers or diastereoisomers are different configurations of a compound that have the same molecular formula and sequence of bonded atoms but differ in the three-dimensional orientations of their atoms in space. Unlike enantiomers, diastereomers are not mirror-images of each other. Each chiral phosphate atom can be in the “R” configuration (Rp) or the “S” configuration (Sp). In certain embodiments, the RNAi constructs may comprise one or more phosphorothioate internucleotide linkages where the chiral phosphates are selected to be primarily in either the Rp or Sp configuration. For instance, in some embodiments in which the RNAi constructs have one or more phosphorothioate internucleotide linkages, at least about 70%, at least about 75%, at least about 80%, at least about 85%, at least about 90%, or at least about 95% of the chiral phosphates are in the Sp configuration. In other embodiments in which the RNAi constructs have one or more phosphorothioate internucleotide linkages, at least about 70%, at least about 75%, at least about 80%, at least about 85%, at least about 90%, or at least about 95% of the chiral phosphates are in the Rp configuration. All the chiral phosphates in the RNAi construct can be either in the Sp configuration or the Rp configuration (i.e., the RNAi construct is stereopure). In some embodiments, all the chiral phosphates in the RNAi construct are in the Sp configuration. In some embodiments, all the chiral phosphates in the RNAi construct are in the Rp configuration.

[0081] In certain embodiments, the chiral phosphates in the RNAi construct may have different configurations at different positions in the sense strand or antisense strand. In one such embodiment in which the RNAi construct comprises one or two phosphorothioate internucleotide linkages at the 5′ end of the antisense strand, the chiral phosphates at the 5′ end of the antisense strand may be in the Rp configuration. In another such embodiment in which the RNAi construct comprises one or two phosphorothioate internucleotide linkages at the 3′ end of the antisense strand, the chiral phosphates at the 3′ end of the antisense strand may be in the Sp configuration. In certain embodiments, the RNAi construct comprises two consecutive phosphorothioate internucleotide linkages between the terminal nucleotides at both the 3′ and 5′ ends of the antisense strand and two consecutive phosphorothioate internucleotide linkages between the terminal nucleotides at the 3′ end of the sense strand, wherein the chiral phosphates at the 5′ end of the antisense strand are in the Rp configuration, the chiral phosphates at the 3′ end of the antisense strand are in the Sp configuration, and the chiral phosphates at the 3′ end of the sense strand can be either in the Rp or Sp configuration. In certain other embodiments, the RNAi construct comprises two consecutive phosphorothioate internucleotide linkages between the terminal nucleotides at both the 3′ and 5′ ends of the antisense strand and a single phosphorothioate internucleotide linkage between the terminal nucleotides at the 3′ end of the sense strand, wherein the chiral phosphates at the 5′ end of the antisense strand are in the Rp configuration, the chiral phosphates at the 3′ end of the antisense strand are in the Sp configuration, and the chiral phosphate at the 3′ end of the sense strand can be either in the Rp or Sp configuration. Methods of controlling the stereochemistry of phosphorothioate linkages during oligonucleotide synthesis are known to those skilled in the art and can include methods described in Nawrot and Rebowska, Curr. Protoc. Nucleic Acid Chem. 2009, Chapter 4: doi:10.1002/0471142700.nc0434s362009; Jahns et al., Nat. Commun., Vol. 6: 6317, 2015; Knouse et al., Science, Vol. 361: 1234-1238, 2018; and Sakamuri et al., ChemBioChem, Vol. 21(9): 1304-1308, 2020.

[0082] In some embodiments of the RNAi constructs, the 5′ end of the sense strand, antisense strand, or both the antisense and sense strands comprises a phosphate moiety. As used herein, the term “phosphate moiety” refers to a terminal phosphate group that includes unmodified phosphates (—O—P═O)(OH)OH) as well as modified phosphates. Modified phosphates include phosphates in which one or more of the O and OH groups are replaced with H, O, S, N(R) or alkyl (e.g., C₁ to C₁₂) where R is H, an amino protecting group or unsubstituted or substituted alkyl (e.g., C₁ to C₁₂). Exemplary phosphate moieties include, but are not limited to, 5′-monophosphate; 5′-diphosphate; 5′-triphosphate; 5′-guanosine cap (7-methylated or non-methylated); 5′-adenosine cap or any other modified or unmodified nucleotide cap structure; 5′-monothiophosphate (phosphorothioate); 5′-monodithiophosphate (phosphorodithioate); 5′-alpha-thiotriphosphate; 5′-gamma-thiotriphosphate, 5′-phosphoramidates; 5′-vinylphosphates; 5′-alkylphosphonates (e.g., alkyl=methyl, ethyl, isopropyl, propyl, etc.); and 5′-alkyletherphosphonates (e.g., alkylether=methoxymethyl, ethoxymethyl, etc.).

[0083] The modified nucleotides that can be incorporated into the RNAi constructs may have more than one chemical modification described herein. For instance, the modified nucleotide may have a modification to the ribose sugar as well as a modification to the nucleobase. By way of example, a modified nucleotide may comprise a 2′ sugar modification (e.g., 2′-fluoro or 2′-O-methyl) and comprise a modified base (e.g., 5-methyl cytosine or pseudouracil). In other embodiments, the modified nucleotide may comprise a sugar modification in combination with a modification to the 5′ phosphate that would create a modified internucleotide or internucleotide linkage when the modified nucleotide was incorporated into a polynucleotide. For instance, in some embodiments, the modified nucleotide may comprise a sugar modification, such as a 2′-fluoro modification, a 2′-O-methyl modification, or a bicyclic sugar modification, as well as a 5′ phosphorothioate group. Accordingly, in some embodiments, one or both strands of the RNAi constructs comprise a combination of 2′ modified nucleotides or BNAs and phosphorothioate internucleotide linkages. In certain embodiments, both the sense and antisense strands of the RNAi constructs comprise a combination of 2′-fluoro modified nucleotides, 2′-O-methyl modified nucleotides, and phosphorothioate internucleotide linkages. Exemplary RNAi constructs comprising modified nucleotides and internucleotide linkages are shown in Table 2.

[0084] Exemplary modification patterns for RNAi constructs are shown in FIGS. 7A-7R. These patterns may be used in the context of the RNAi duplexes disclosed herein, or in the context of RNAi constructs in general. FIGS. 7A-7R each show a hybridized sense (top) and antisense (bottom) strand, in which each of the nucleotides is modified. The solid circles in FIGS. 7A-7R correspond to 2′-O-methyl ribonucleotides, while the open circles correspond to 2′-deoxy-2′-fluoro (“2′-fluoro”) ribonucleotides. The hatched circles correspond to inverted abasic deoxynucleotides. Bold lines indicate where a phosphorothioate bond is used in place of the standard phosphodiester bond between nucleotides. Finally, arrows represent where a ligand (e.g., GalNAc or a fatty acid such as C22) may be attached to the RNAi construct. As demonstrated in the Examples below, these modification patterns are effective across a range of different trigger sequences in the FAM13A sequence, indicating that they are generally applicable to RNAi constructs.

[0085] The RNAi constructs can readily be made using techniques known in the art, for example, using conventional nucleic acid solid phase synthesis. The polynucleotides of the RNAi constructs can be assembled on a suitable nucleic acid synthesizer utilizing standard nucleotide or nucleoside precursors (e.g., phosphoramidites). Automated nucleic acid synthesizers are sold commercially by several vendors, including DNA/RNA synthesizers from Applied Biosystems (Foster City, CA), MerMade synthesizers from BioAutomation (Irving, TX), and OligoPilot synthesizers from GE Healthcare Life Sciences (Pittsburgh, PA). An exemplary method for synthesizing the RNAi constructs is described in Example 3.

[0086] A 2′ silyl protecting group can be used in conjunction with acid labile dimethoxytrityl (DMT) at the 5′ position of ribonucleosides to synthesize oligonucleotides via phosphoramidite chemistry. Final deprotection conditions are known not to significantly degrade RNA products. All syntheses can be conducted in any automated or manual synthesizer on large, medium, or small scale. The syntheses may also be carried out in multiple well plates, columns, or glass slides.

[0087] The 2′-O-silyl group can be removed via exposure to fluoride ions, which can include any source of fluoride ion, e.g., those salts containing fluoride ion paired with inorganic counterions e.g., cesium fluoride and potassium fluoride or those salts containing fluoride ion paired with an organic counterion, e.g., a tetraalkylammonium fluoride. A crown ether catalyst can be utilized in combination with the inorganic fluoride in the deprotection reaction. Exemplary fluoride ion sources are tetrabutylammonium fluoride or aminohydrofluorides (e.g., combining aqueous HF with triethylamine in a dipolar aprotic solvent, e.g., dimethylformamide).

[0088] The choice of protecting groups for use on the phosphite triesters and phosphotriesters can alter the stability of the triesters towards fluoride. Methyl protection of the phosphotriester or phosphite triester can stabilize the linkage against fluoride ions and improve process yields.

[0089] Since ribonucleosides have a reactive 2′ hydroxyl substituent, it can be desirable to protect the reactive 2′ position in RNA with a protecting group that is orthogonal to a 5′-O-dimethoxytrityl protecting group, e.g., one stable to treatment with acid. Silyl protecting groups meet this criterion and can be readily removed in a final fluoride deprotection step that can result in minimal RNA degradation.

[0090] Tetrazole catalysts can be used in the standard phosphoramidite coupling reaction. Exemplary catalysts include, e.g., tetrazole, S-ethyl-tetrazole, benzylthiotetrazole, p-nitrophenyltetrazole.

[0091] As can be appreciated by the skilled artisan, further methods of synthesizing the RNAi constructs described herein will be evident to those of ordinary skill in the art. Additionally, the various synthetic steps may be performed in an alternate sequence or order to give the desired compounds. Other synthetic chemistry transformations, protecting groups (e.g., for hydroxyl, amino, etc. present on the bases) and protecting group methodologies (protection and deprotection) useful in synthesizing the RNAi constructs described herein are known in the art and include, for example, those such as described in R. Larock, Comprehensive Organic Transformations, VCH Publishers (1989); T. W. Greene and P. G. M. Wuts, Protective Groups in Organic Synthesis, 2d. Ed., John Wiley and Sons (1991); L. Fieser and M. Fieser, Fieser and Fieser's Reagents for Organic Synthesis, John Wiley and Sons (1994); and L. Paquette, ed., Encyclopedia of Reagents for Organic Synthesis, John Wiley and Sons (1995), and subsequent editions thereof. Custom synthesis of RNAi constructs is also available from several commercial vendors, including Dharmacon, Inc. (Lafayette, CO), AxoLabs GmbH (Kulmbach, Germany), and Ambion, Inc. (Foster City, CA).

[0092] The RNAi constructs may comprise a ligand. As used herein, a “ligand” refers to any compound or molecule that is capable of interacting with another compound or molecule, directly or indirectly. The interaction of a ligand with another compound or molecule may elicit a biological response (e.g., initiate a signal transduction cascade, induce receptor-mediated endocytosis) or may just be a physical association. The ligand can modify one or more properties of the double-stranded RNA molecule to which is attached, such as the pharmacodynamic, pharmacokinetic, binding, absorption, cellular distribution, cellular uptake, charge and/or clearance properties of the RNA molecule.

[0093] The ligand may comprise a serum protein (e.g., human serum albumin, low-density lipoprotein, globulin), a cholesterol moiety, a vitamin (biotin, vitamin E, vitamin B12), a folate moiety, a steroid, a bile acid (e.g., cholic acid), a fatty acid (e.g., palmitic acid, myristic acid), a carbohydrate (e.g., a dextran, pullulan, chitin, chitosan, inulin, cyclodextrin or hyaluronic acid), a glycoside, a phospholipid, or antibody or binding fragment thereof (e.g., antibody or binding fragment that targets the RNAi construct to a specific cell type, such as liver). Other examples of ligands include dyes, intercalating agents (e.g., acridines), cross-linkers (e.g., psoralene, mitomycin C), porphyrins (TPPC4, texaphyrin, Sapphyrin), polycyclic aromatic hydrocarbons (e.g., phenazine, dihydrophenazine), artificial endonucleases (e.g., EDTA), lipophilic molecules, e.g., adamantane acetic acid, 1-pyrene butyric acid, dihydrotestosterone, 1,3-Bis-O(hexadecyl)glycerol, geranyloxyhexyl group, hexadecylglycerol, borneol, menthol, 1,3-propanediol, heptadecyl group, O3-(oleoyl)lithocholic acid, O3-(oleoyl)cholenic acid, dimethoxytrityl, or phenoxazine), peptides (e.g., antennapedia peptide, Tat peptide, RGD peptides), alkylating agents, polymers, such as polyethylene glycol (PEG)(e.g., PEG-40K), polyamino acids, and polyamines (e.g., spermine, spermidine).

[0094] In certain embodiments, the ligands have endosomolytic properties. The endosomolytic ligands promote the lysis of the endosome and/or transport of the RNAi construct, or its components, from the endosome to the cytoplasm of the cell. The endosomolytic ligand may be a polycationic peptide or peptidomimetic, which shows pH-dependent membrane activity and fusogenicity. In one embodiment, the endosomolytic ligand assumes its active conformation at endosomal pH. The “active” conformation is that conformation in which the endosomolytic ligand promotes lysis of the endosome and/or transport of the RNAi construct, or its components, from the endosome to the cytoplasm of the cell. Exemplary endosomolytic ligands include the GALA peptide (Subbarao et al., Biochemistry, Vol. 26: 2964-2972, 1987), the EALA peptide (Vogel et al., J. Am. Chem. Soc., Vol. 118: 1581-1586, 1996), and their derivatives (Turk et al., Biochem. Biophys. Acta, Vol. 1559: 56-68, 2002). In one embodiment, the endosomolytic component may contain a chemical group (e.g., an amino acid) which will undergo a change in charge or protonation in response to a change in pH. The endosomolytic component may be linear or branched.

[0095] In some embodiments, the ligand comprises a lipid or other hydrophobic molecule. In one embodiment, the ligand comprises a cholesterol moiety or other steroid. Cholesterol-conjugated oligonucleotides have been reported to be more active than their unconjugated counterparts (Manoharan, Antisense Nucleic Acid Drug Development, Vol. 12: 103-228, 2002). Ligands comprising cholesterol moieties and other lipids for conjugation to nucleic acid molecules have also been described in U.S. Pat. Nos. 7,851,615; 7,745,608; and 7,833,992, all of which are hereby incorporated by reference in their entireties. In another embodiment, the ligand comprises a folate moiety. Polynucleotides conjugated to folate moieties can be taken up by cells via a receptor-mediated endocytosis pathway. Such folate-polynucleotide conjugates are described in U.S. Pat. No. 8,188,247, which is hereby incorporated by reference in its entirety.

[0096] In certain embodiments, it is desirable to specifically deliver the RNAi constructs to liver cells to reduce expression of FAM13A protein specifically in the liver. Accordingly, in certain embodiments, the ligand targets delivery of the RNAi construct specifically to liver cells (e.g., hepatocytes) using various approaches as described in more detail below. In certain embodiments, the RNAi constructs are targeted to liver cells with a ligand that binds to the surface-expressed asialoglycoprotein receptor (ASGR) or component thereof (e.g., ASGR1, ASGR2).

[0097] In some embodiments, RNAi constructs can be specifically targeted to the liver by employing ligands that bind to or interact with proteins expressed on the surface of liver cells. For example, in certain embodiments, the ligands may comprise antigen binding proteins (e.g., antibodies or binding fragments thereof (e.g., Fab, scFv)) that specifically bind to a receptor expressed on hepatocytes, such as the asialoglycoprotein receptor and the LDL receptor. In some embodiments, the ligand comprises an antibody or binding fragment thereof that specifically binds to ASGR1 and/or ASGR2. In another embodiment, the ligand comprises a Fab fragment of an antibody that specifically binds to ASGR1 and/or ASGR2. A “Fab fragment” is comprised of one immunoglobulin light chain (i.e., light chain variable region (VL) and constant region (CL)) and the CH1 region and variable region (VH) of one immunoglobulin heavy chain. In another embodiment, the ligand comprises a single-chain variable antibody fragment (scFv fragment) of an antibody that specifically binds to ASGR1 and/or ASGR2. An “scFv fragment” comprises the VH and VL regions of an antibody, wherein these regions are present in a single polypeptide chain, and optionally comprising a peptide linker between the VH and VL regions that enables the FAT to form the desired structure for antigen binding. Exemplary antibodies and binding fragments thereof that specifically bind to ASGR1 that can be used as ligands for targeting the RNAi constructs to the liver are described in WIPO Publication No. WO 2017/058944, which is hereby incorporated by reference in its entirety. Other antibodies or binding fragments thereof that specifically bind to ASGR1, LDL receptor, or other liver surface-expressed proteins suitable for use as ligands in the RNAi constructs are commercially available.

[0098] In certain embodiments, it is desirable to specifically deliver the RNAi constructs to adipose tissue or adipose cells to reduce expression of FAM13A protein specifically in adipose cells. Accordingly, in certain embodiments, the ligand targets delivery of the RNAi construct specifically to adipose cells (e.g., subcutaneous white adipose tissue (scWAT) or epididymal white adipose tissue (eWAT)) using various approaches as described in more detail below. In certain embodiments, the RNAi constructs are targeted to adipose tissue or cells by conjugation to long-chain fatty acids, which are saturated or unsaturated fatty acids containing between 12 and 24 carbon atoms. In some embodiments, the long-chain fatty acid is lauric acid (C12), myristic acid (C14), palmitic acid (C16), stearic acid (C18), eicosapentaenoic acid (C20), docosanoic acid (C22), or docosahexanoic acid (C24).

[0099] In certain embodiments, it is desirable to deliver the RNAi constructs systemically to reduce expression of FAM13A protein in multiple or all cell types. Accordingly, in certain embodiments, the ligand targets delivery of the RNAi construct using methods known in the art to facilitate cellular delivery of siRNA (see, e.g., U.S. Pat. No. 10,633,653; WO 2022/016043, each of which is incorporated by reference in their entirety). In some embodiments, the RNAi constructs are targeted to cells by conjugation to cholesterol, α-tocopherol, or fatty acids. In some embodiments, the RNAi constructs are targeted to cells by conjugation to omega fatty acids. In certain embodiments, the RNAi constructs are targeted to cells by conjugation to long-chain fatty acids such as lauric acid (C12), myristic acid (C14), palmitic acid (C16), stearic acid (C18), eicosapentaenoic acid (C20), docosanoic acid (C22), or docosahexanoic acid (C24).

[0100] In certain embodiments, the ligand comprises a carbohydrate. A “carbohydrate” refers to a compound made up of one or more monosaccharide units having at least 6 carbon atoms (which can be linear, branched, or cyclic) with an oxygen, nitrogen or sulfur atom bonded to each carbon atom. Carbohydrates include, but are not limited to, the sugars (e.g., monosaccharides, disaccharides, trisaccharides, tetrasaccharides, and oligosaccharides containing from about 4, 5, 6, 7, 8, or 9 monosaccharide units), and polysaccharides, such as starches, glycogen, cellulose, and polysaccharide gums. In some embodiments, the carbohydrate incorporated into the ligand is a monosaccharide selected from a pentose, hexose, or heptose and di- and tri-saccharides including such monosaccharide units. In other embodiments, the carbohydrate incorporated into the ligand is an amino sugar, such as galactosamine, glucosamine, N-acetylgalactosamine, and N-acetylglucosamine.

[0101] In some embodiments, the ligand comprises a hexose or hexosamine. The hexose may be selected from glucose, galactose, mannose, fucose, or fructose. The hexosamine may be selected from fructosamine, galactosamine, glucosamine, or mannosamine. In certain embodiments, the ligand comprises glucose, galactose, galactosamine, or glucosamine. In one embodiment, the ligand comprises glucose, glucosamine, or N-acetylglucosamine. In another embodiment, the ligand comprises galactose, galactosamine, or N-acetyl-galactosamine. In particular embodiments, the ligand comprises N-acetyl-galactosamine. Ligands comprising glucose, galactose, and N-acetyl-galactosamine (GalNAc) are particularly effective in targeting compounds to liver cells because such ligands bind to the ASGR expressed on the surface of hepatocytes. See, e.g., D'Souza and Devarajan, J. Control Release, Vol. 203: 126-139, 2015. Examples of GalNAc- or galactose-containing ligands that can be incorporated into the RNAi constructs are described in U.S. Pat. Nos. 7,491,805; 8,106,022; and 8,877,917; U.S. Patent Publication No. 20030130186; and WIPO Publication No. WO 2013166155, all of which are hereby incorporated by reference in their entireties.

[0102] In certain embodiments, the ligand comprises a multivalent carbohydrate moiety. As used herein, a “multivalent carbohydrate moiety” refers to a moiety comprising two or more carbohydrate units capable of independently binding or interacting with other molecules. For example, a multivalent carbohydrate moiety comprises two or more binding domains comprised of carbohydrates that can bind to two or more different molecules or two or more different sites on the same molecule. The valency of the carbohydrate moiety denotes the number of individual binding domains within the carbohydrate moiety. For instance, the terms “monovalent,” “bivalent,” “trivalent,” and “tetravalent” with reference to the carbohydrate moiety refer to carbohydrate moieties with one, two, three, and four binding domains, respectively. The multivalent carbohydrate moiety may comprise a multivalent lactose moiety, a multivalent galactose moiety, a multivalent glucose moiety, a multivalent N-acetyl-galactosamine moiety, a multivalent N-acetyl-glucosamine moiety, a multivalent mannose moiety, or a multivalent fucose moiety. In some embodiments, the ligand comprises a multivalent galactose moiety. In other embodiments, the ligand comprises a multivalent N-acetyl-galactosamine moiety. In these and other embodiments, the multivalent carbohydrate moiety can be bivalent, trivalent, or tetravalent. In such embodiments, the multivalent carbohydrate moiety can be bi-antennary or tri-antennary. In some embodiments, the multivalent N-acetyl-galactosamine moiety is trivalent or tetravalent. In some embodiments, the multivalent galactose moiety is trivalent or tetravalent. Exemplary trivalent and tetravalent GalNAc-containing ligands for incorporation into the RNAi constructs are described in detail below.

[0103] The ligand can be attached or conjugated to the RNA molecule of the RNAi construct directly or indirectly. For instance, in some embodiments, the ligand is covalently attached directly to the sense or antisense strand of the RNAi construct. In other embodiments, the ligand is covalently attached via a linker to the sense or antisense strand of the RNAi construct. The ligand can be attached to nucleobases, sugar moieties, or internucleotide linkages of polynucleotides (e.g., sense strand or antisense strand) of the RNAi constructs. Conjugation or attachment to purine nucleobases or derivatives thereof can occur at any position including, endocyclic and exocyclic atoms. In certain embodiments, the 2-, 6-, 7-, or 8-positions of a purine nucleobase are attached to a ligand. Conjugation or attachment to pyrimidine nucleobases or derivatives thereof can also occur at any position. In some embodiments, the 2-, 5-, and 6-positions of a pyrimidine nucleobase can be attached to a ligand. Conjugation or attachment to sugar moieties of nucleotides can occur at any carbon atom. Exemplary carbon atoms of a sugar moiety that can be attached to a ligand include the 2′, 3′, and 5′ carbon atoms. The 1′ position can also be attached to a ligand, such as in an abasic nucleotide. Internucleotide linkages can also support ligand attachments. For phosphorus-containing linkages (e.g., phosphodiester, phosphorothioate, phosphorodithioate, phosphoroamidate, and the like), the ligand can be attached directly to the phosphorus atom or to an O, N, or S atom bound to the phosphorus atom. For amine- or amide-containing internucleotide linkages (e.g., PNA), the ligand can be attached to the nitrogen atom of the amine or amide or to an adjacent carbon atom.

[0104] In some embodiments, the ligand may be attached to the 3′ or 5′ end of either the sense or antisense strand. In certain embodiments, the ligand is covalently attached to the 5′ end of the sense strand. In such embodiments, the ligand is attached to the 5′-terminal nucleotide of the sense strand. In these and other embodiments, the ligand is attached at the 5′-position of the 5′-terminal nucleotide of the sense strand. In embodiments in which an inverted abasic nucleotide is the 5′-terminal nucleotide of the sense strand and linked to the adjacent nucleotide via a 5′-5′ internucleotide linkage, the ligand can be attached at the 3′-position of the inverted abasic nucleotide. In other embodiments, the ligand is covalently attached to the 3′ end of the sense strand. For example, in some embodiments, the ligand is attached to the 3′-terminal nucleotide of the sense strand. In certain such embodiments, the ligand is attached at the 3′-position of the 3′-terminal nucleotide of the sense strand. In embodiments in which an inverted abasic nucleotide is the 3′-terminal nucleotide of the sense strand and linked to the adjacent nucleotide via a 3′-3′ internucleotide linkage, the ligand can be attached at the 5′-position of the inverted abasic nucleotide. In alternative embodiments, the ligand is attached near the 3′ end of the sense strand, but before one or more terminal nucleotides (i.e., before 1, 2, 3, or 4 terminal nucleotides). In some embodiments, the ligand is attached at the 2′-position of the sugar of the 3′-terminal nucleotide of the sense strand. In other embodiments, the ligand is attached at the 2′-position of the sugar of the 5′-terminal nucleotide of the sense strand.

[0105] In certain embodiments, the ligand is attached to the sense or antisense strand via a linker. A “linker” is an atom or group of atoms that covalently joins a ligand to a polynucleotide component of the RNAi construct. The linker may be from about 1 to about 30 atoms in length, from about 2 to about 28 atoms in length, from about 3 to about 26 atoms in length, from about 4 to about 24 atoms in length, from about 6 to about 20 atoms in length, from about 7 to about 20 atoms in length, from about 8 to about 20 atoms in length, from about 8 to about 18 atoms in length, from about 10 to about 18 atoms in length, and from about 12 to about 18 atoms in length. In some embodiments, the linker may comprise a bifunctional linking moiety, which generally comprises an alkyl moiety with two functional groups. One of the functional groups is selected to bind to the compound of interest (e.g., sense or antisense strand of the RNAi construct) and the other is selected to bind essentially any selected group, such as a ligand as described herein. In certain embodiments, the linker comprises a chain structure or an oligomer of repeating units, such as ethylene glycol or amino acid units. Examples of functional groups that are typically employed in a bifunctional linking moiety include, but are not limited to, electrophiles for reacting with nucleophilic groups and nucleophiles for reacting with electrophilic groups. In some embodiments, bifunctional linking moieties include amino, hydroxyl, carboxylic acid, thiol, unsaturations (e.g., double or triple bonds), and the like.

[0106] Linkers that may be used to attach a ligand to the sense or antisense strand in the RNAi constructs include, but are not limited to, pyrrolidine, 8-amino-3,6-dioxaoctanoic acid, succinimidyl 4-(N-maleimidomethyl)cyclohexane-1-carboxylate, 6-aminohexanoic acid, substituted C₁-C₁₀ alkyl, substituted or unsubstituted C₂-C₁₀ alkenyl or substituted or unsubstituted C₂-C₁₀ alkynyl. Suitable substituent groups for such linkers include, but are not limited to, hydroxyl, amino, alkoxy, carboxy, benzyl, phenyl, nitro, thiol, thioalkoxy, halogen, alkyl, aryl, alkenyl and alkynyl.

[0107] In certain embodiments, the linkers are cleavable. A cleavable linker is one which is sufficiently stable outside the cell, but which upon entry into a target cell is cleaved to release the two parts the linker is holding together. In some embodiments, the cleavable linker is cleaved at least 10 times, 20 times, 30 times, 40 times, 50 times, 60 times, 70 times, 80 times, 90 times, or more, or at least 100 times faster in the target cell or under a first reference condition (which can, e.g., be selected to mimic or represent intracellular conditions) than in the blood of a subject, or under a second reference condition (which can, e.g., be selected to mimic or represent conditions found in the blood or serum).

[0108] Cleavable linkers are susceptible to cleavage agents, e.g., pH, redox potential, or the presence of degradative molecules. Generally, cleavage agents are more prevalent or found at higher levels or activities inside cells than in serum or blood. Examples of such degradative agents include: redox agents which are selected for particular substrates or which have no substrate specificity, including, e.g., oxidative or reductive enzymes or reductive agents such as mercaptans, present in cells, that can degrade a redox cleavable linker by reduction; esterases; endosomes or agents that can create an acidic environment, e.g., those that result in a pH of five or lower; enzymes that can hydrolyze or degrade an acid cleavable linker by acting as a general acid, peptidases (which can be substrate specific), and phosphatases.

[0109] A cleavable linker may comprise a moiety that is susceptible to pH. The pH of human serum is 7.4, while the average intracellular pH is slightly lower, ranging from about 7.1-7.3. Endosomes have a more acidic pH, in the range of 5.5-6.0, and lysosomes have an even more acidic pH at around 5.0. Some linkers will have a cleavable group that is cleaved at a preferred pH, thereby releasing the RNA molecule from the ligand inside the cell, or into the desired compartment of the cell.

[0110] A linker can include a cleavable group that is cleavable by a particular enzyme. The type of cleavable group incorporated into a linker can depend on the cell to be targeted. For example, liver-targeting ligands can be linked to RNA molecules through a linker that includes an ester group. Liver cells are rich in esterases, and therefore the linker will be cleaved more efficiently in liver cells than in cell types that are not esterase rich. Other types of cells rich in esterases include cells of the lung, renal cortex, and testis. Linkers that contain peptide bonds can be used when targeting cells rich in peptidases, such as liver cells and synoviocytes.

[0111] In general, the suitability of a candidate cleavable linker can be evaluated by testing the ability of a degradative agent (or condition) to cleave the candidate linker. It will also be desirable to also test the candidate cleavable linker for the ability to resist cleavage in the blood or when in contact with other non-target tissue. Thus, one can determine the relative susceptibility to cleavage between a first and a second condition, where the first is selected to be indicative of cleavage in a target cell and the second is selected to be indicative of cleavage in other tissues or biological fluids, e.g., blood or serum. The evaluations can be carried out in cell free systems, in cells, in cell culture, in organ or tissue culture, or in whole animals. It may be useful to make initial evaluations in cell-free or culture conditions and to confirm by further evaluations in whole animals. In some embodiments, useful candidate linkers are cleaved at least 2, 4, 10, 20, 50, 70, or 100 times faster in the cell (or under in vitro conditions selected to mimic intracellular conditions) as compared to blood or serum (or under in vitro conditions selected to mimic extracellular conditions).

[0112] In other embodiments, redox cleavable linkers are utilized. Redox cleavable linkers are cleaved upon reduction or oxidation. An example of a reductively cleavable group is a disulfide linking group (—S—S—). To determine if a candidate cleavable linker is a suitable “reductively cleavable linker,” or for example is suitable for use with a particular RNAi construct and particular ligand, one can use one or more methods described herein. For example, a candidate linker can be evaluated by incubation with dithiothreitol (DTT), or other reducing agent known in the art, which mimics the rate of cleavage that would be observed in a cell, e.g., a target cell. The candidate linkers can also be evaluated under conditions which are selected to mimic blood or serum conditions. In a specific embodiment, candidate linkers are cleaved by at most 10% in the blood. In other embodiments, useful candidate linkers are degraded at least 2, 4, 10, 20, 50, 70, or 100 times faster in the cell (or under in vitro conditions selected to mimic intracellular conditions) as compared to blood (or under in vitro conditions selected to mimic extracellular conditions).

[0113] In yet other embodiments, phosphate-based cleavable linkers, which are cleaved by agents that degrade or hydrolyze the phosphate group, are employed to covalently attach a ligand to the sense or antisense strand of the RNAi construct. An example of an agent that hydrolyzes phosphate groups in cells are enzymes, such as phosphatases in cells. Examples of phosphate-based cleavable groups are —O—P(O)(ORk)-O—, —O—P(S)(ORk)-O—, —O—P(S)(SRk)-O—, —S—P(O) (ORk)O—, —O—P(O)(ORk)-S—, —S—P(O)(ORk)-S—, —O—P(S)(ORk)-S—, —S—P(S)(ORk)O—, —O—P(O)(Rk)O—, —O—P(S)(Rk)-O—, —S—P(O)(Rk)-O—, —S—P(S)(Rk)O—, —S—P(O)(Rk)-S—, and —O—P(S)(Rk)-S—, where Rk can be hydrogen or C₁-C₁₀ alkyl. Specific embodiments include —O—P(O)(OH)O—, —O—P(S)(OH)O—, —O—P(S)(SH)—O—, —S—P(O)(OH)—O—, —O—P(O)(OH)—S—, —S—P(O)(OH)—S—, —O—P(S)(OH)—S—, —S—P(S)(OH)—O—, —O—P(O)(H)—O—, —O—P(S)(H)—O—, —S—P(O)(H)—O—, —S—P(S)(H)—O—, —S—P(O)(H)—S—, and —O—P(S)(H)—S—. Another specific embodiment is —O—P(O)(OH)—O—. These candidate linkers can be evaluated using methods analogous to those described above.

[0114] In other embodiments, the linkers may comprise acid cleavable groups, which are groups that are cleaved under acidic conditions. In some embodiments, acid cleavable groups are cleaved in an acidic environment with a pH of about 6.5 or lower (e.g., about 6.0, 5.5, 5.0, or lower), or by agents, such as enzymes that can act as a general acid. In a cell, specific low pH organelles, such as endosomes and lysosomes, can provide a cleaving environment for acid cleavable groups. Examples of acid cleavable linking groups include, but are not limited to, hydrazones, esters, and esters of amino acids. Acid cleavable groups can have the general formula —C═NN—, C(O)O, or —OC(O). A specific embodiment is when the carbon attached to the oxygen of the ester (the alkoxy group) is an aryl group, substituted alkyl group, or tertiary alkyl group such as dimethyl, pentyl or t-butyl. These candidates can be evaluated using methods analogous to those described above.

[0115] In other embodiments, the linkers may comprise ester-based cleavable groups, which are cleaved by enzymes, such as esterases and amidases in cells. Examples of ester-based cleavable groups include, but are not limited to, esters of alkylene, alkenylene and alkynylene groups. Ester cleavable groups have the general formula —C(O)O—, or —OC(O)—. These candidate linkers can be evaluated using methods analogous to those described above.

[0116] In further embodiments, the linkers may comprise peptide-based cleavable groups, which are cleaved by enzymes, such as peptidases and proteases in cells. Peptide-based cleavable groups are peptide bonds formed between amino acids to yield oligopeptides (e.g., dipeptides, tripeptides) and polypeptides. Peptide-based cleavable groups include the amide group (—C(O)NH—). The amide group can be formed between any alkylene, alkenylene or alkynylene. A peptide bond is a special type of amide bond formed between amino acids to yield peptides and proteins. The peptide-based cleavage group is generally limited to the peptide bond (i.e., the amide bond) formed between amino acids yielding peptides and proteins. Peptide-based cleavable linking groups have the general formula —NHCHR^{A}C(O)NHCHR^{B}C(O)—, where R^{A} and R^{B} are the side chains of the two adjacent amino acids. These candidates can be evaluated using methods analogous to those described above.

[0117] Other types of linkers suitable for attaching ligands to the sense or antisense strands in the RNAi constructs are known in the art and can include the linkers described in U.S. Pat. Nos. 7,723,509; 8,017,762; 8,828,956; 8,877,917; and 9,181,551, all of which are hereby incorporated by reference in their entireties.

[0118] In certain embodiments, the ligand covalently attached to the sense or antisense strand of the RNAi constructs comprises a GalNAc moiety, e.g., a multivalent GalNAc moiety. In some embodiments, the multivalent GalNAc moiety is a trivalent GalNAc moiety and is attached to the 3′ end of the sense strand. In other embodiments, the multivalent GalNAc moiety is a trivalent GalNAc moiety and is attached to the 5′ end of the sense strand. In yet other embodiments, the multivalent GalNAc moiety is a tetravalent GalNAc moiety and is attached to the 3′ end of the sense strand. In still other embodiments, the multivalent GalNAc moiety is a tetravalent GalNAc moiety and is attached to the 5′ end of the sense strand.

[0119] In certain embodiments, the RNAi constructs comprise a ligand having the following structure ([Structure 1]):

[chemical structure]

[0120] In preferred embodiments, the ligand having this structure is covalently attached to the 5′ end of the sense strand (e.g., to the 5′ terminal nucleotide of the sense strand) via a linker, such as the linkers described herein. In one embodiment, the linker is an aminohexyl linker.

[0121] Exemplary trivalent and tetravalent GalNAc moieties and linkers that can be attached to the double-stranded RNA molecules in the RNAi constructs are provided in the structural formulas I-IX below. “Ac” in the formulas listed herein represents an acetyl group.

[0122] In one embodiment, the RNAi construct comprises a ligand and linker having the following structure of Formula I, wherein each n is independently 1 to 3, k is 1 to 3, m is 1 or 2, j is 1 or 2, and the ligand is attached to the 3′ end of the sense strand of the double-stranded RNA molecule (represented by the solid wavy line):

[chemical structure]

[0123] In another embodiment, the RNAi construct comprises a ligand and linker having the following structure of Formula II, wherein each n is independently 1 to 3, k is 1 to 3, m is 1 or 2, j is 1 or 2, and the ligand is attached to the 3′ end of the sense strand of the double-stranded RNA molecule (represented by the solid wavy line):

[chemical structure]

[0124] In yet another embodiment, the RNAi construct comprises a ligand and linker having the following structure of Formula III, wherein the ligand is attached to the 3′ end of the sense strand of the double-stranded RNA molecule (represented by the solid wavy line):

[chemical structure]

[0125] In still another embodiment, the RNAi construct comprises a ligand and linker having the following structure of Formula IV, wherein the ligand is attached to the 3′ end of the sense strand of the double-stranded RNA molecule (represented by the solid wavy line):

[chemical structure]

[0126] In certain embodiments, the RNAi construct comprises a ligand and linker having the following structure of Formula V, wherein each n is independently 1 to 3, k is 1 to 3, and the ligand is attached to the 5′ end of the sense strand of the double-stranded RNA molecule (represented by the solid wavy line):

[chemical structure]

[0127] In other embodiments, the RNAi construct comprises a ligand and linker having the following structure of Formula VI, wherein each n is independently 1 to 3, k is 1 to 3, and the ligand is attached to the 5′ end of the sense strand of the double-stranded RNA molecule (represented by the solid wavy line):

[chemical structure]

[0128] In some embodiments, the RNAi construct comprises a ligand and linker having the following structure of Formula VII, wherein X═O or S and wherein the ligand is attached to the 5′ end of the sense strand of the double-stranded RNA molecule (represented by the squiggly line):

[chemical structure]

[0129] In some embodiments, the RNAi construct comprises a ligand and linker having the following structure of Formula VIII, wherein each n is independently 1 to 3 and the ligand is attached to the 5′ end of the sense strand of the double-stranded RNA molecule (represented by the solid wavy line):

[chemical structure]

[0130] In certain embodiments, the RNAi construct comprises a ligand and linker having the following structure of Formula IX, wherein the ligand is attached to the 5′ end of the sense strand of the double-stranded RNA molecule (represented by the solid wavy line):

[chemical structure]

[0131] A phosphorothioate bond can be substituted for the phosphodiester bond shown in any one of Formulas I-IX to covalently attach the ligand and linker to the nucleic acid strand.

### Pharmaceutical Compositions

[0132] The present application also includes pharmaceutical compositions and formulations comprising the RNAi constructs described herein and pharmaceutically acceptable carriers, excipients, or diluents. Such compositions and formulations are useful for reducing expression of the FAM13A gene and FAM13A protein in a patient in need thereof. Where clinical applications are contemplated, pharmaceutical compositions and formulations will be prepared in a form appropriate for the intended application. Generally, this will entail preparing compositions that are essentially free of pyrogens, as well as other impurities that could be harmful to humans or animals.

[0133] The phrases “pharmaceutically acceptable” or “pharmacologically acceptable” refer to molecular entities and compositions that do not produce adverse, allergic, or other untoward reactions when administered to an animal or a human. As used herein, “pharmaceutically acceptable carrier, excipient, or diluent” includes solvents, buffers, solutions, dispersion media, coatings, antibacterial and antifungal agents, isotonic and absorption delaying agents and the like acceptable for use in formulating pharmaceuticals, such as pharmaceuticals suitable for administration to humans. The use of such media and agents for pharmaceutically active substances is well known in the art. Except insofar as any conventional media or agent is incompatible with the disclosed RNAi constructs, its use in therapeutic compositions is contemplated. Supplementary active ingredients also can be incorporated into the compositions, provided they do not inactivate the RNAi constructs of the compositions.

[0134] Compositions and methods for the formulation of pharmaceutical compositions depend on a number of criteria, including, but not limited to, route of administration, type and extent of disease or disorder to be treated, or dose to be administered. In some embodiments, the pharmaceutical compositions are formulated based on the intended route of delivery. For instance, in certain embodiments, the pharmaceutical compositions are formulated for parenteral delivery. Parenteral forms of delivery include intravenous, intraarterial, subcutaneous, intrathecal, intraperitoneal, or intramuscular injection or infusion. In one embodiment, the pharmaceutical composition is formulated for intravenous delivery. In such an embodiment, the pharmaceutical composition may include a lipid-based delivery vehicle. In another embodiment, the pharmaceutical composition is formulated for subcutaneous delivery. In such an embodiment, the pharmaceutical composition may include a targeting ligand (e.g., a GalNAc-containing, fatty acid-containing, or antibody-containing ligand as described herein).

[0135] In some embodiments, the pharmaceutical compositions comprise an effective amount of an RNAi construct described herein. An “effective amount” is an amount sufficient to produce a beneficial or desired clinical result. In some embodiments, an effective amount is an amount sufficient to reduce FAM13A gene expression in a particular tissue or cell-type (e.g., liver or hepatocytes or adipose tissue) of a patient. An effective amount of an RNAi construct may be from about 0.01 mg/kg body weight to about 100 mg/kg body weight, and may be administered daily, weekly, monthly, or at longer intervals. The precise determination of what would be considered an effective amount and frequency of administration may be based on several factors, including a patient's size, age, and general condition, type of disorder to be treated (e.g., fatty liver disease, liver fibrosis, or cardiovascular disease), RNAi construct employed, and route of administration.

[0136] Administration of the disclosed pharmaceutical compositions may be via any common route so long as the target tissue is available via that route. Such routes include, but are not limited to, parenteral (e.g., subcutaneous, intramuscular, intraperitoneal, or intravenous), oral, nasal, buccal, intradermal, transdermal, and sublingual routes, or by direct injection into tissue (e.g., liver or adipose) or delivery through the hepatic portal vein. In some embodiments, the pharmaceutical composition is administered parenterally. For instance, in certain embodiments, the pharmaceutical composition is administered intravenously. In other embodiments, the pharmaceutical composition is administered subcutaneously.

[0137] Colloidal dispersion systems, such as macromolecule complexes, nanocapsules, microspheres, beads, and lipid-based systems, including oil-in-water emulsions, micelles, mixed micelles, and liposomes, may be used as delivery vehicles for the RNAi constructs. Commercially available fat emulsions that are suitable for delivering the nucleic acids include Intralipid® (Baxter International Inc.), Liposyn® (Abbott Pharmaceuticals), Liposyn® II (Hospira), Liposyn® III (Hospira), Nutrilipid (B. Braun Medical Inc.), and other similar lipid emulsions. An exemplary colloidal system for use as a delivery vehicle in vivo is a liposome (i.e., an artificial membrane vesicle). The RNAi constructs may be encapsulated within liposomes or may form complexes thereto, in particular to cationic liposomes. Alternatively, RNAi constructs may be complexed to lipids, in particular to cationic lipids. Suitable lipids and liposomes include neutral (e.g., dioleoylphosphatidyl ethanolamine (DOPE), dimyristoylphosphatidyl choline (DMPC), and dipalmitoyl phosphatidylcholine (DPPC)), distearolyphosphatidyl choline), negative (e.g., dimyristoylphosphatidyl glycerol (DMPG)), and cationic (e.g., dioleoyltetramethylaminopropyl (DOTAP) and dioleoylphosphatidyl ethanolamine (DOTMA)). The preparation and use of such colloidal dispersion systems are well known in the art. Exemplary formulations are also disclosed in U.S. Pat. Nos. 5,981,505; 6,217,900; 6,383,512; 5,783,565; 7,202,227; 6,379,965; 6,127,170; 5,837,533; 6,747,014; and WIPO Publication No. WO 03/093449.

[0138] In some embodiments, the RNAi constructs are fully encapsulated in a lipid formulation, e.g., to form a SNALP or other nucleic acid-lipid particle. As used herein, the term “SNALP” refers to a stable nucleic acid-lipid particle. SNALPs typically contain a cationic lipid, a non-cationic lipid, and a lipid that prevents aggregation of the particle (e.g., a PEG-lipid conjugate). SNALPs are exceptionally useful for systemic applications, as they exhibit extended circulation lifetimes following intravenous injection and accumulate at distal sites (e.g., sites physically separated from the administration site). The nucleic acid-lipid particles typically have a mean diameter of about 50 nm to about 150 nm, about 60 nm to about 130 nm, about 70 nm to about 110 nm, or about 70 nm to about 90 nm, and are substantially nontoxic. In addition, the nucleic acids when present in the nucleic acid-lipid particles are resistant in aqueous solution to degradation with a nuclease. Nucleic acid-lipid particles and their method of preparation are disclosed in, e.g., U.S. Pat. Nos. 5,976,567; 5,981,501; 6,534,484; 6,586,410; 6,815,432; and WIPO Publication No. WO 96/40964.

[0139] The pharmaceutical compositions suitable for injectable use include, for example, sterile aqueous solutions or dispersions and sterile powders for the extemporaneous preparation of sterile injectable solutions or dispersions. Generally, these preparations are sterile and fluid to the extent that easy injectability exists. Preparations should be stable under the conditions of manufacture and storage and should be preserved against the contaminating action of microorganisms, such as bacteria and fungi. Appropriate solvents or dispersion media may contain, for example, water, ethanol, polyol (for example, glycerol, propylene glycol, and liquid polyethylene glycol, and the like), suitable mixtures thereof, and vegetable oils. The proper fluidity can be maintained, for example, by using a coating, such as lecithin, by maintaining the required particle size in the case of dispersion and by using surfactants. The prevention of the action of microorganisms can be brought about by various antibacterial and antifungal agents, for example, parabens, chlorobutanol, phenol, sorbic acid, thimerosal, and the like. In many cases, it will be preferable to include isotonic agents, for example, sugars or sodium chloride. Prolonged absorption of the injectable compositions can be brought about by the use in the compositions of agents delaying absorption, for example, aluminum monostearate and gelatin.

[0140] Sterile injectable solutions may be prepared by incorporating the active compounds in an appropriate amount into a solvent along with any other ingredients (for example as enumerated above) as desired, followed by filtered sterilization. Generally, dispersions are prepared by incorporating the various sterilized active ingredients into a sterile vehicle which contains the basic dispersion medium and the desired other ingredients, e.g., as enumerated above. In the case of sterile powders for the preparation of sterile injectable solutions, the preferred methods of preparation include vacuum-drying and freeze-drying techniques which yield a powder of the active ingredient(s) plus any additional desired ingredient from a previously sterile-filtered solution thereof.

[0141] The compositions of the present application generally may be formulated in a neutral or salt form. Pharmaceutically acceptable salts include, for example, acid addition salts (formed with free amino groups) derived from inorganic acids (e.g., hydrochloric or phosphoric acids), or from organic acids (e.g., acetic, oxalic, tartaric, mandelic, and the like). Salts formed with the free carboxyl groups can also be derived from inorganic bases (e.g., sodium, potassium, ammonium, calcium, or ferric hydroxides) or from organic bases (e.g., isopropylamine, trimethylamine, histidine, procaine and the like). Pharmaceutically acceptable salts are described in detail in Berge et al., J. Pharmaceutical Sciences, Vol. 66: 1-19, 1977.

[0142] For parenteral administration in an aqueous solution, for example, the solution generally is suitably buffered, and the liquid diluent first rendered isotonic for example with sufficient saline or glucose. Such aqueous solutions may be used, for example, for intravenous, intramuscular, subcutaneous, and intraperitoneal administration. Preferably, sterile aqueous media are employed as is known to those of skill in the art, particularly in light of the present disclosure. By way of illustration, a single dose may be dissolved in 1 mL of isotonic NaCl solution and either added to 1000 mL of hypodermoclysis fluid or injected at the proposed site of infusion, (see for example, “Remington's Pharmaceutical Sciences” 15th Edition, pages 1035-1038 and 1570-1580). For human administration, preparations should meet sterility, pyrogenicity, general safety and purity standards as required by FDA standards. In certain embodiments, a pharmaceutical composition comprises or consists of a sterile saline solution and an RNAi construct described herein. In other embodiments, a pharmaceutical composition comprises or consists of an RNAi construct described herein and sterile water (e.g., water for injection, WFI). In still other embodiments, a pharmaceutical composition comprises or consists of an RNAi construct described herein and phosphate-buffered saline (PBS).

[0143] In some embodiments, the pharmaceutical compositions are packaged with or stored within a device for administration. Devices for injectable formulations include, but are not limited to, injection ports, pre-filled syringes, autoinjectors, injection pumps, on-body injectors, and injection pens. Devices for aerosolized or powder formulations include, but are not limited to, inhalers, insufflators, aspirators, and the like. Thus, some embodiments comprise administration devices comprising a disclosed pharmaceutical composition for treating or preventing one or more of the diseases or disorders described herein.

### Uses for and Methods Using the Disclosed RNAi Constructs

[0144] The present application provides a method for reducing or inhibiting expression of the FAM13A gene, and thus the production of FAM13A protein, in a cell (e.g., liver cell or adipose cell) by contacting the cell with any one of the RNAi constructs described herein. The cell may be in vitro or in vivo. Any method capable of measuring FAM13A mRNA or FAM13A protein can be used to assess the efficacy of the RNAi constructs. The terms “FAM13A expression” and “expression of FAM13A,” as used herein, refer to the level of FAM13A gene transcription, amount of FAM13A mRNA present, level of FAM13A translation, and amount of FAM13A protein present. Therefore, FAM13A expression can be assessed by measuring the amount or level of FAM13A mRNA, FAM13A protein, or another biomarker linked to FAM13A expression, such as serum or plasma levels of triglycerides, cholesterol, or insulin. The phrase “reduction in FAM13A expression,” as used herein, refers to a decrease in one or more of the level of FAM13A gene transcription, amount of FAM13A mRNA present, level of FAM13A translation, and amount of FAM13A protein present.

[0145] The reduction of FAM13A expression in cells or animals treated with an RNAi construct can be determined relative to the FAM13A expression in cells or animals not treated with the RNAi construct or treated with a control RNAi construct. For instance, in some embodiments, reduction of FAM13A expression is assessed by (a) measuring the amount or level of FAM13A mRNA in cells (e.g., liver or adipose cells) treated with an RNAi construct, (b) measuring the amount or level of FAM13A mRNA in cells (e.g., liver or adipose cells) treated with a control RNAi construct (e.g., RNAi construct directed to an RNA molecule not expressed in cells or a RNAi construct having a nonsense or scrambled sequence) or no construct, and (c) comparing the measured FAM13A mRNA levels from treated cells in (a) to the measured FAM13A mRNA levels from control cells in (b). The FAM13A mRNA levels in the treated cells and controls cells can be normalized to RNA levels for a control gene (e.g., 18S ribosomal RNA or housekeeping gene) prior to comparison. FAM13A mRNA levels can be measured by a variety of methods, including Northern blot analysis, nuclease protection assays, fluorescence in situ hybridization (FISH), reverse-transcriptase (RT)-PCR, real-time RT-PCR, quantitative PCR, droplet digital PCR, and the like.

[0146] In other embodiments, reduction of FAM13A expression is assessed by (a) measuring the amount or level of FAM13A protein in cells (e.g., liver or adipose cells) treated with an RNAi construct, (b) measuring the amount or level of FAM13A protein in cells (e.g., liver or adipose cells) treated with a control RNAi construct (e.g., RNAi construct directed to an RNA molecule not expressed in cells or a RNAi construct having a nonsense or scrambled sequence) or no construct, and (c) comparing the measured FAM13A protein levels from treated cells in (a) to the measured FAM13A protein levels from control cells in (b). Methods of measuring FAM13A protein levels are known to those of skill in the art, and include Western Blots, immunoassays (e.g., ELISA), and flow cytometry.

[0147] In some embodiments, the methods to assess FAM13A expression levels are performed in vitro in cells that natively express FAM13A (e.g., liver or adipose cells) or cells that have been engineered to express FAM13A. In certain embodiments, the methods are performed in vitro in liver cells or adipose cells. Suitable liver cells include, but are not limited to, primary hepatocytes (e.g., human or non-human primate hepatocytes), HepAD38 cells, HuH-6 cells, HuH-7 cells, HuH-5-2 cells, BNLCL2 cells, Hep3B cells, or HepG2 cells. In one embodiment, the liver cells are HuH-7 cells. In another embodiment, the liver cells are human primary hepatocytes. In yet another embodiment, the liver cells are Hep3B cells. Suitable adipose cells include cells from subcutaneous white adipose tissue (scWAT), cells from epididymal white adipose tissue (eWAT), or 3T3-L1 cells.

[0148] In other embodiments, the methods to assess FAM13A expression levels are performed in vivo. The RNAi constructs and any control RNAi constructs can be administered to an animal and FAM13A mRNA or FAM13A protein levels assessed in liver or adipose tissue harvested from the animal following treatment. Alternatively or additionally, a biomarker or functional phenotype associated with FAM13A expression can be assessed in the treated animals. For instance, people with FAM13A variants with reduced FAM13A expression also have reduced serum triglycerides and increased HDL cholesterol, and people with FAM13A variants with increased FAM13A expression also have increased triglycerides and decreased HDL cholesterol (FIG. 1). Additionally, FAM13A expression is significantly correlated with fasting insulin levels. Fathzadeh et al., Nature Communications 11, 1465 (2020). Thus, in some embodiments the goal and result of FAM13A knockdown is to reduce serum or plasma levels of triglycerides, cholesterol, or insulin, and such reduction can be measured in animals treated with RNAi constructs to assess the functional efficacy of reducing FAM13A expression.

[0149] In certain embodiments, expression of FAM13A mRNA or protein is reduced in liver or adipose cells by at least 40%, at least 45%, or at least 50% by an RNAi construct. In some embodiments, expression of FAM13A mRNA or protein is reduced in liver or adipose cells by at least 60%, at least 65%, at least 70%, at least 75%, at least 80%, or at least 85% by an RNAi construct. In other embodiments, the expression of FAM13A mRNA or protein is reduced in liver or adipose cells by about 90% or more, e.g., 91%, 92%, 93%, 94%, 95%, 96%, 97%, 98%, 99%, or more by an RNAi construct. The percent reduction of FAM13A expression can be measured by any of the methods described herein as well as others known in the art.

[0150] The present application provides methods for reducing or inhibiting expression of the FAM13A gene, and thus the production of FAM13A protein, in a patient in need thereof as well as methods of treating or preventing conditions, diseases, or disorders associated with FAM13A expression or activity. A “condition, disease, or disorder associated with FAM13A expression” refers to conditions, diseases, or disorders in which FAM13A expression levels are altered or where elevated expression levels of FAM13A are associated with an increased risk of developing the condition, disease, or disorder. A condition, disease, or disorder associated with FAM13A expression can also include conditions, diseases, or disorders resulting from aberrant changes in lipoprotein metabolism, such as changes resulting in abnormal or elevated levels of cholesterol, lipids, triglycerides, etc., or impaired clearance of these molecules. In certain embodiments, the RNAi constructs are particularly useful for treating or preventing abdominal adiposity, fatty liver disease (e.g., NAFLD and NASH) and cardiovascular disease (e.g., coronary artery disease and myocardial infarction), as well as reducing liver fibrosis and serum cholesterol levels.

[0151] Conditions, diseases, and disorders associated with FAM13A expression that can be treated or prevented according to the methods include, but are not limited to, fatty liver disease, such as alcoholic fatty liver disease, abdominal adiposity, alcoholic steatohepatitis, NAFLD and NASH; chronic liver disease; cirrhosis; cardiovascular disease, such as myocardial infarction, heart failure, stroke (ischemic and hemorrhagic), atherosclerosis, coronary artery disease, peripheral vascular disease (e.g., peripheral artery disease), cerebrovascular disease, vulnerable plaque, and aortic valve stenosis; familial hypercholesterolemia; venous thrombosis; hypercholesterolemia; hyperlipidemia; and dyslipidemia (manifesting, e.g., as elevated total cholesterol, elevated low-density lipoprotein (LDL), elevated very low-density lipoprotein (VLDL), elevated triglycerides, and/or low levels of high-density lipoprotein (HDL)).

[0152] In certain embodiments, the present application provides a method for reducing the expression of FAM13A protein in a patient in need thereof comprising administering to the patient any of the RNAi constructs described herein. The term “patient,” as used herein, refers to a mammal, including humans, and can be used interchangeably with the term “subject.” Preferably, the expression level of FAM13A in hepatocytes in the patient is reduced following administration of the RNAi construct as compared to the FAM13A expression level in a patient not receiving the RNAi construct or as compared to the FAM13A expression level in the patient prior to administration of the RNAi construct. In some embodiments, following administration of an RNAi construct, expression of FAM13A is reduced in the patient by at least 30%, at least 35%, at least 40%, at least 45%, at least 50%, at least 55%, at least 60%, at least 65%, at least 70%, at least 75%, at least 80%, at least 85%, or at least 90%, e.g., 91%, 92%, 93%, 94%, 95%, 96%, 97%, 98%, or 99%. The percent reduction of FAM13A expression can be measured by any of the methods described herein as well as others known in the art.

[0153] In some embodiments, a patient in need of reduction of FAM13A expression is a patient who is at risk of having a myocardial infarction. A patient who is at risk of having a myocardial infarction may be a patient who has a history of myocardial infarction (e.g., has had a previous myocardial infarction). A patient at risk of having a myocardial infarction may also be a patient who has a familial history of myocardial infarction or who has one or more risk factors of myocardial infarction. Such risk factors include, but are not limited to, hypertension, elevated levels of non-HDL cholesterol, elevated levels of triglycerides, diabetes, obesity, or history of autoimmune diseases (e.g., rheumatoid arthritis, lupus). In one embodiment, a patient who is at risk of having a myocardial infarction is a patient who has or is diagnosed with coronary artery disease. The risk of myocardial infarction in these and other patients can be reduced by administering to the patients any of the RNAi constructs described herein. Accordingly, a method for reducing the risk of myocardial infarction in a patient in need thereof comprises administering to the patient an RNAi construct described herein. In some embodiments, any of the RNAi constructs described herein may be used in the preparation of a medicament for reducing the risk of myocardial infarction in a patient in need thereof. Some embodiments comprise a FAM13A-targeting RNAi construct for use in a method for reducing the risk of myocardial infarction in a patient in need thereof.

[0154] In certain embodiments, a patient in need of reduction of FAM13A expression is a patient who is diagnosed with or at risk of cardiovascular disease. Thus, a method for treating or preventing cardiovascular disease in a patient in need thereof comprises administering any of the RNAi constructs. In some embodiments, any of the RNAi constructs described herein may be used in the preparation of a medicament for treating or preventing cardiovascular disease in a patient in need thereof. Some embodiments comprise a FAM13A-targeting RNAi construct may for use in a method for treating or preventing cardiovascular disease in a patient in need thereof. Cardiovascular disease includes, but is not limited to, myocardial infarction, heart failure, stroke (ischemic and hemorrhagic), atherosclerosis, coronary artery disease, peripheral vascular disease (e.g., peripheral artery disease), cerebrovascular disease, vulnerable plaque, and aortic valve stenosis. In some embodiments, the cardiovascular disease to be treated or prevented according to the disclosed methods is coronary artery disease. In other embodiments, the cardiovascular disease to be treated or prevented according to the disclosed methods is myocardial infarction. In yet other embodiments, the cardiovascular disease to be treated or prevented according to the disclosed methods is stroke. In still other embodiments, the cardiovascular disease to be treated or prevented according to the disclosed methods is peripheral artery disease. In certain embodiments, administration of the RNAi constructs described herein reduces the risk of non-fatal myocardial infarctions, fatal and non-fatal strokes, certain types of heart surgery (e.g., angioplasty, bypass), hospitalization for heart failure, chest pain in patients with heart disease, and/or cardiovascular events in patients with established heart disease (e.g., prior myocardial infarction, prior heart surgery, and/or chest pain with evidence of blocked arteries). In some embodiments, administration of the RNAi constructs described herein can be used to reduce the risk of recurrent cardiovascular events.

[0155] In some embodiments, a patient to be treated according to the disclosed methods is a patient who has a vulnerable plaque (also referred to as unstable plaque). Vulnerable plaques are a build-up of macrophages and lipids containing predominantly cholesterol that lie underneath the endothelial lining of the arterial wall. These vulnerable plaques can rupture resulting in the formation of a blood clot, which can potentially block blood flow through the artery and cause a myocardial infarction or stroke. Vulnerable plaques can be identified by methods known in the art, including, but not limited to, intravascular ultrasound and computed tomography (see Sahara et al., European Heart Journal, Vol. 25: 2026-2033, 2004; Budhoff, J. Am. Coll. Cardiol., Vol. 48: 319-321, 2006; Hausleiter et al., J. Am. Coll. Cardiol., Vol. 48: 312-318, 2006).

[0156] In other embodiments, a patient in need of reduction of FAM13A expression is a patient who has elevated blood levels of cholesterol (e.g., total cholesterol, non-HDL cholesterol, or LDL cholesterol). Accordingly, in some embodiments, a method for reducing blood levels (e.g., serum or plasma) of cholesterol in a patient in need thereof comprises administering to the patient any of the RNAi constructs described herein. In some embodiments, any of the RNAi constructs described herein may be used in the preparation of a medicament for reducing blood levels (e.g., serum or plasma) of cholesterol in a patient in need thereof. Some embodiments comprise a FAM13A-targeting RNAi construct for use in a method for reducing blood levels (e.g., serum or plasma) of cholesterol in a patient in need thereof. In certain embodiments, the cholesterol reduced according to the disclosed methods is LDL cholesterol. In other embodiments, the cholesterol reduced according to the disclosed methods is non-HDL cholesterol. Non-HDL cholesterol is a measure of all cholesterol-containing proatherogenic lipoproteins, including LDL cholesterol, very low-density lipoprotein, intermediate-density lipoprotein, lipoprotein(a), chylomicron, and chylomicron remnants. Non-HDL cholesterol has been reported to be a good predictor of cardiovascular risk (Rana et al., Curr. Atheroscler. Rep., Vol. 14:130-134, 2012). Non-HDL cholesterol levels can be calculated by subtracting HDL cholesterol levels from total cholesterol levels.

[0157] In some embodiments, a patient to be treated is a patient who has elevated levels of non-HDL cholesterol (e.g., elevated serum or plasma levels of non-HDL cholesterol). Ideally, levels of non-HDL cholesterol should be about 30 mg/dL above the target for LDL cholesterol levels for any given patient. In particular embodiments, a patient is administered an RNAi construct if the patient has a non-HDL cholesterol level of about 130 mg/dL or greater. In one embodiment, a patient is administered an RNAi construct if the patient has a non-HDL cholesterol level of about 160 mg/dL or greater. In another embodiment, a patient is administered an RNAi construct if the patient has a non-HDL cholesterol level of about 190 mg/dL or greater. In still another embodiment, a patient is administered an RNAi construct if the patient has a non-HDL cholesterol level of about 220 mg/dL or greater. In certain embodiments, a patient is administered an RNAi construct if the patient is at a high or very high risk of cardiovascular disease according to the 2013 ACC/AHA Guideline on the Assessment of Cardiovascular Risk (Goff et al., ACC/AHA guideline on the assessment of cardiovascular risk: a report of the American College of Cardiology/American Heart Association Task Force on Practice Guidelines. J Am Coll Cardiol, Vol. 63:2935-2959, 2014) and has a non-HDL cholesterol level of about 100 mg/dL or greater.

[0158] In certain embodiments, a patient is administered an RNAi construct described herein if they are at a moderate risk or higher for cardiovascular disease according to the 2013 ACC/AHA Guideline on the Assessment of Cardiovascular Risk (referred to herein as the “2013 Guidelines”). In certain embodiments, an RNAi construct is administered to a patient if the patient's LDL cholesterol level is greater than about 160 mg/dL. In other embodiments, an RNAi construct is administered to a patient if the patient's LDL cholesterol level is greater than about 130 mg/dL and the patient has a moderate risk of cardiovascular disease according to the 2013 Guidelines. In still other embodiments, an RNAi construct is administered to a patient if the patient's LDL cholesterol level is greater than 100 mg/dL and the patient has a high or very high risk of cardiovascular disease according to the 2013 Guidelines.

[0159] In other embodiments, a patient in need of reduction of FAM13A expression is a patient who is diagnosed with or at risk of fatty liver disease. Thus, a method for treating, preventing, or reducing the risk of developing fatty liver disease in a patient in need thereof comprises administering to the patient any of the disclosed RNAi constructs. In some embodiments, any of the RNAi constructs described herein may be used in the preparation of a medicament for treating, preventing, or reducing the risk of developing fatty liver disease in a patient in need thereof. Other embodiments comprise a FAM13A-targeting RNAi construct for use in a method for treating, preventing, or reducing the risk of developing fatty liver disease in a patient in need thereof. Fatty liver disease is a condition in which fat accumulates in the liver. There are two primary types of fatty liver disease: a first type that is associated with heavy alcohol use (alcoholic steatohepatitis) and a second type that is not related to use of alcohol (nonalcoholic fatty liver disease (NAFLD)). NAFLD is typically characterized by the presence of fat accumulation in the liver but little or no inflammation or liver cell damage. NAFLD can progress to nonalcoholic steatohepatitis (NASH), which is characterized by liver inflammation and cell damage, both of which in turn can lead to liver fibrosis and eventually cirrhosis or hepatic cancer. In certain embodiments, the fatty liver disease to be treated, prevented, or reduce the risk of developing is NAFLD. In other embodiments, the fatty liver disease to be treated, prevented, or reduce the risk of developing is NASH. In still other embodiments, the fatty liver disease to be treated, prevented, or reduce the risk of developing is alcoholic steatohepatitis. In some embodiments, a patient in need of treatment or prevention for fatty liver disease or is at risk of developing fatty liver disease has been diagnosed with type 2 diabetes, a metabolic disorder, or is obese (e.g., body mass index of ≥30.0). In other embodiments, a patient in need of treatment or prevention for fatty liver disease or is at risk of developing fatty liver disease has elevated levels of non-HDL cholesterol or triglycerides. Depending on the patient and other risk factors that patient may have, elevated levels of non-HDL cholesterol may be about 130 mg/dL or greater, about 160 mg/dL or greater, about 190 mg/dL or greater, or about 220 mg/dL or greater. Elevated triglyceride levels may be about 150 mg/dL or greater, about 175 mg/dL or greater, about 200 mg/dL or greater, or about 250 mg/dL or greater.

[0160] In certain embodiments, a patient in need of reduction of FAM13A expression is a patient who is diagnosed with or at risk of developing hepatic fibrosis or cirrhosis. Accordingly, some embodiments comprise a method for treating, preventing, or reducing liver fibrosis in a patient in need thereof comprising administering to the patient any of the disclosed RNAi constructs. Some embodiments comprise use of any of the RNAi constructs described herein in the preparation of a medicament for treating, preventing, or reducing liver fibrosis in a patient in need thereof. Some embodiments comprise a FAM13A-targeting RNAi construct for use in a method for treating, preventing, or reducing liver fibrosis in a patient in need thereof. In some embodiments, a patient at risk for developing hepatic fibrosis or cirrhosis is diagnosed with NAFLD. In other embodiments, a patient at risk for developing hepatic fibrosis or cirrhosis is diagnosed with NASH. In yet other embodiments, a patient at risk for developing hepatic fibrosis or cirrhosis is diagnosed with alcoholic steatohepatitis. In still other embodiments, a patient at risk for developing hepatic fibrosis or cirrhosis is diagnosed with hepatitis. In certain embodiments, administration of a disclosed RNAi construct prevents or delays the development of cirrhosis in the patient.

[0161] In other embodiments, a patient in need of reduction of FAM13A expression is a patient who has been diagnosed with abdominal adiposity or a high waist to hip ratio (WHR). In some embodiments, the patient in need of reduction has a waist to hip ratio in excess of 0.95, in excess of 1.0, in excess of 10.5, or in excess of 1.1. Accordingly, in some embodiments, a method for reducing abdominal adiposity or WHR in a patient in need thereof comprises administering to the patient any of the RNAi constructs described herein. In some embodiments, any of the RNAi constructs described herein may be used in the preparation of a medicament for reducing abdominal adiposity or WHR in a patient in need thereof. Some embodiments comprise a FAM13A-targeting RNAi construct for use in a method for reducing abdominal adiposity or WHR in a patient in need thereof.

[0162] In some embodiments, patients in need of reduction of FAM13A expression are treated using RNAi constructs targeted specifically to the liver. In some embodiments, the RNAi construct is targeted by conjugation to a ligand comprising N-acetyl-galactosamine (GalNAc). Accordingly, in some embodiments, a method for reducing FAM13A levels in a patient in need thereof comprises administering to the patient any of the RNAi constructs described herein that has been conjugated to GalNAc.

### Definitions of General Terms and Expressions

[0163] In order that the present disclosure can be more readily understood, certain terms are first defined. Unless defined otherwise, all technical and scientific terms used herein have the same meaning as commonly understood by one of ordinary skill in the art to which this disclosure is related. As used in this application, except as otherwise expressly provided herein, each of the following terms shall have the meaning set forth below. Additional definitions are set forth throughout the application.

[0164] Units, prefixes, and symbols are denoted in their Système International de Unites (SI) accepted form.

[0165] As used in the present disclosure and claims, the singular forms “a,” “an,” and “the” include plural forms unless the context clearly dictates otherwise. Unless specifically stated or obvious from context, as used herein, the term “or” is understood to be inclusive. The term “and/or” as used in a phrase such as “A and/or B” herein is intended to include both “A and B,” “A or B,” “A,” and “B.” Likewise, the term “and/or” as used in a phrase such as “A, B, and/or C” is intended to encompass each of the following embodiments: A, B, and C; A, B, or C; A or C; A or B; B or C; A and C; A and B; B and C; A (alone); B (alone); and C (alone).

[0166] It is understood that wherever embodiments are described herein with the language “comprising,” otherwise analogous embodiments described in terms of “consisting of” and/or “consisting essentially of” are also provided. In this disclosure, “comprises,” “comprising,” “containing” and “having” and the like can have the meaning ascribed to them in U.S. patent law and can mean “includes,” “including,” and the like; “consisting essentially of” or “consists essentially” likewise has the meaning ascribed in U.S. patent law and the term is open-ended, allowing for the presence of more than that which is recited so long as basic or novel characteristics of that which is recited is not changed by the presence of more than that which is recited, but excludes prior art embodiments.

[0167] The terms “about” or “comprising essentially of” refer to a value or composition that is within an acceptable error range for the particular value or composition as determined by one of ordinary skill in the art, which will depend in part on how the value or composition is measured or determined, i.e., the limitations of the measurement system. For example, “about” or “comprising essentially of” can mean within 1 or more than 1 standard deviation per the practice in the art. Alternatively, “about” or “comprising essentially of” can mean a range of up to 20%. Furthermore, particularly with respect to biological systems or processes, the terms can mean up to an order of magnitude or up to 5-fold of a value. When particular values or compositions are provided in the application and claims, unless otherwise stated, the meaning of “about” or “comprising essentially of” should be assumed to be within an acceptable error range for that particular value or composition.

[0168] Any compositions or methods provided herein can be combined with one or more of any of the other compositions and methods provided herein.

[0169] The following examples, including the experiments conducted and the results achieved, are provided for illustrative purposes only and are not to be construed as limiting the scope of the appended claims.

### EXAMPLES

### Example 1: Genomic and Expression Analysis of FAM13A

[0170] Genomic analysis was performed to examine the association of three common FAM13A variants for their association with adjusted for BMI (WHRadjBMI), triglyceride levels, HDL cholesterol levels, systolic blood pressure, and FAM13A expression in subcutaneous adipose tissue eQTL data. The results of this analysis are presented in FIG. 1 and show that three FAM13A variants associate independently with WHR adjusted for BMI.

[0171] First, the signal A variant rs57400569-A is an intronic SNP that is disease protective and is associated with increased HDL cholesterol and decreased WHR, triglycerides, and systolic blood pressure. rs57400569-A is associated with decreased FAM13A expression in deCODE adipose tissue eQTL data. rs57400569-A, consistent with FAM13A expression being correlated with disease state. The analysis also confirmed a reported association with blood pressure, while discovering previously unreported association with WHR, triglycerides, and HDL. rs57400569-A was also the top cis-eQTL variant in adipose.

[0172] Next, the signal B variant rs7657817-T is a protein coding missense variant that is associated with decreased WHR and triglycerides and increased HDL cholesterol. rs7657817-T is also disease protective, and the analysis confirmed previously reported literature associations.

[0173] Finally, the signal C variant rs9991328-T is an intronic SNP that is disease promoting and is associated with decreased HDL cholesterol and increased WHR, triglycerides, and FAM13A expression in deCODE adipose tissue eQTL data. Notably, rs9991328 has a strong, reproducible Genome Wide Association Study (GWAS) association with WHR in multiple studies (5-10) with a highly significant association reported in UK Biobank data (p=1×10⁻⁵¹) (5). Additionally, the rs9991328 WHR raising allele was significantly associated with increased fasting insulin levels (a measure of insulin resistance; p=5.9×10⁻²¹). rs9991328-T is disease promoting, and the analysis confirmed previously reported literature associations.

[0174] The waist-hip ratio raising alleles associate with increased triglycerides, reduced HDL cholesterol, increased systolic blood pressure, and increased FAM13A expression in subcutaneous adipose tissue.

### Example 2: siRNA-Mediated Knockdown of Murine Fam13a In Vivo

[0175] To test the hypothesis that reduced Fam13a expression is associated with reduced WHR & CVD risk factors, a series of mouse Fam13a siRNA experiments were performed. Fam13a siRNAs were conjugated to a palmitate lipid (C16) or GalNAc (attached as described in Example 3 below), and these molecules were tested for their ability to reduce Fam13a expression in cultured cells or in vivo (i.e., in adipose tissue or liver). These experiments were performed with commercially available mouse Fam13a siRNA triggers. The triggers are available from Ambion (s81721) or Dharmacon (J-041073-09), and were prepared as modified siRNA duplexes. The murine siRNA duplex sequences were:

D-0001 sense
(SEQ ID NO: 2786)
GAAAGAUUCCAGGACGAU
D-0001 antisense
(SEQ ID NO: 2787)
UAUCGUCCUGGAAUCUUUCUG
D-0002 sense
(SEQ ID NO: 2788)
GAAUCAAGAUGGUGAAGA
D-0002 antisense
(SEQ ID NO: 2789)
AUCUUCACCAUCUUGAUUCCUC
D-0003 sense
(SEQ ID NO: 2790)
AGGAAUCAAGAUGGUGAAGA
D-0003 antisense
(SEQ ID NO: 2791)
AUCUUCACCAUCUUGAUUCCUCU

[0176] These sequences were prepared as modified duplexes, as shown below. The nucleotide sequences of these modified duplexes apply the following notations: a, u, g, and c=corresponding 2′-O-methyl ribonucleotide; Af, Uf, Gf, and Cf=corresponding 2′-deoxy-2′-fluoro (“2′-fluoro”) ribonucleotide; and invAb=inverted abasic deoxynucleotide (i.e., abasic deoxynucleotide linked to adjacent nucleotide via a substituent at its 3′ position (a 3′-3′ linkage) when on the 3′ end of a strand or linked to adjacent nucleotide via a substituent at its 5′ position (a 5′-5′ internucleotide linkage) when on the 5′ end of a strand. Insertion of an “s” in the sequence indicates that the two adjacent nucleotides are connected by a phosphorothiodiester group (e.g., a phosphorothioate internucleotide linkage). Unless indicated otherwise, all other nucleotides are connected by 3′-5′ phosphodiester groups. The Fam13a siRNAs were conjugated to a palmitate lipid (C16) or GalNAc, using the methods provided in Example 3 below.

D-0004 sense
(SEQ ID NO: 2792)
gaaagaUfuCfCfAfGfgacgasus{invAb}
D-0004 antisense
(SEQ ID NO: 2793)
usAfsucguCfcuggAfaUfcuuucsusg
D-0005 sense
(SEQ ID NO: 2794)
gaaucaAfgAfUfGfGfugaagsas{invAb}
D-0005 antisense
(SEQ ID NO: 2795)
asUfscuucAfccauCfuUfgauucscsu
D-0006 sense
(SEQ ID NO: 2796)
{DCA-C6}saggaaucaAfgAfUfGfGfugaagas{invAb}
D-0006 antisense
(SEQ ID NO: 2797)
asUfscuucAfccauCfuUfgauuccuscsu

[0177] In Vitro Fam13a siRNA Treatment

[0178] Fam13a siRNA effects on Fam13a RNA expression levels were analyzed in murine kidney-derived (Renca cell line; ATCC CRL-2947) and adipose-derived (primary adipocytes) cultured cells. FIGS. 2A and 2B show the results of this in vitro dose-response study of Fam13a siRNA's effects in Renca cells and primary adipocytes.

[0179] For experiments in Renca cells, siRNAs were transfected into cells using Lipofectamine RNAiMAX transfection reagent (Thermo Fisher Scientific). Cells were plated in 96-well plates at 12,500 cells per well in 100 μL, base medium (RPMI-1640, 10% FBS, 1% Non-essential amino acids, 1% sodium pyruvate, 2% L-glutamine, and 1% penicillin-streptomycin) and incubated overnight. For transfection, 150 μL RNAiMAX was mixed with OptiMEM (final dilution 0.3 μL RNAiMAX per well), then 1 mM siRNA was diluted to 60 μM in OptiMEM/RNAiMAx and then further diluted to 6 nM starting concentration. siRNAs were serially diluted 1:10 from 6 nM, 0.6 nM, 0.06 nM, and 0.006 nM. To the 100 μL plating media, 20 μL OptiMEM/RNAiMAX+siRNA were added for final concentrations of 1 nM, 0.1 nM, 0.01 nM, 0.001 nM, and 0 nM of each siRNA. Cells were incubated for 72 hrs. at 37° C. and 5% CO₂ then media was removed and lysed with 150 μL Buffer RLT (Qiagen). RNA was isolated using RNeasy 96 RNA isolation protocol following manufacturer's instructions (Qiagen). Real-time PCR was performed using TaqMan® RNA-to-Ct™ 1-Step Kit following manufacturer's instructions (ThermoFisher) with 4.25 μL RNA and TaqMan® gene expression assays (ThermoFisher) for Fam13a (Mm00467910) and Hprt (Mm03024075).

[0180] For experiments in primary mouse adipocytes, using the method originally described by Viswanadha and Londos (Viswanadha, S. & Londos, C. Optimized conditions for measuring lipolysis in murine primary adipocytes. J. Lipid Res. 47, 1859-1864 (2006)), the subcutaneous WAT was isolated and dissected from male DIO mice, weighed, and immediately submerged in Krebs-Ringer bicarbonate (KRB) buffer at pH 7.4 with 4% bovine serum albumin (BSA), 500 nM adenosine, and 5 mM glucose, and the stromal vascular fraction (SVF) and primary adipocytes were separated by collagenase digestion (1 mg/mL KRB) and incubated at 37° C. with shaking at 220 rpm for 1 h. After digestion, the mixture was filtered through a 250-μm gauze mesh into a 15-mL conical polypropylene tube and the infranatant containing the collagenase solution and the SVF was carefully removed using a long needle and syringe. The SVF was cultured as previously described by Hausman et al. (Hausman, D. B., Park, H. J. & Hausman, G. J. Isolation and culture of preadipocytes from rodent white adipose tissue. Methods Mol. Biol. 456, 201-219 (2008)) where the SVF containing solution was centrifuged at 200×g for 10 min to pellet the SVF cells, resuspended in 10 mL plating medium (DMEM/F12+10% FBS), then filtered through a sterile 20-μm mesh filter into a sterile 50-mL plastic centrifuge tube. SVF cells were plated in 24-well plate at 250,000 cells/well and incubated at 37° C. and 5% CO₂ overnight then the plating medium and nonadherent cells where removed, replaced with DMEM/F12 media+5% FBS, and media was replaced every two days until cells reached confluency (5-6 days after plating). Differentiation was induced by the addition of differentiation media for 48 h (DMEM/F12+5% FBS+17 nM insulin, 0.1 μM dexamethasone, 250 μM 3-Isobutyl-1-methylxanthine (IBMX), and 60 μM indomethacin). After 48 h, the differentiation media was replaced by maintenance media (DMEM/F12+10% FBS+17 nM insulin) for a total of 10 days with the maintenance media replaced every 2-3 days. On day 10 of differentiation, C16 conjugated siRNAs were diluted to 10 μM in maintenance media then 10 μM siRNA was serially diluted 1:10 from 10 μM, 1 μM, 100 nM, 10 nM, 1 nM, 0.1 nM, and 0.01 nM. Maintenance media was removed from the cells and replaced with 1.5 mL siRNA containing media and cells were incubated for 72 hrs. at 37° C. and 5% CO₂. After 72 hours, media was removed and cells were collected in 1 mL Qiazol (Qiagen) per well. RNA was isolated using RNeasy 96 universal tissue kit RNA isolation protocol following manufacturer's instructions (Qiagen). Real-time PCR was performed using TaqMan® RNA-to-Ct™ 1-Step Kit following manufacturer's instructions (ThermoFisher) with 4.25 μL RNA and TaqMan® gene expression assays (ThermoFisher) for Fam13a (Mm00467910) and Ppib (Mm00478295).

[0181] As shown in FIGS. 2A and 2B, each tested Fam13a siRNA construct reduced Fam13a expression in a dose-dependent manner. At the highest concentrations, 58%, 68%, or 81% reduction in Fam13a mRNA expression levels were observed in Renca cells. Similarly, at the highest concentrations, 49%, 75%, and 78% reduction in Fam13a mRNA levels were observed in primary adipocytes.

[0182] 5-Day In Vivo Fam13a siRNA Treatment in Diet-Induced Obese Mice

[0183] Fam13a siRNA effects on Fam13a RNA expression levels were analyzed in the high fat diet (HFD) murine model of diet-induced obesity (DIO) and insulin resistance within 5 days. Mice were placed on a HFD for 12 weeks (18 weeks old; n=6/group). Mice were then subcutaneously administered a single injection containing a 30 mg/kg dose of C16 conjugated murine Fam13a siRNA, a control C16 siRNA targeting mHprt (C16-Hprt siRNA), or vehicle control. Five days post-injection, mice were sacrificed and necropsy was performed in which subcutaneous WAT, epididymal WAT, and liver tissue were obtained. Fam13a RNA expression levels were using RNeasy 96 universal tissue kit RNA isolation protocol following manufacturer's instructions (Qiagen). Real-time PCR was performed using TaqMan® RNA-to-Ct™ 1-Step Kit following manufacturer's instructions (ThermoFisher) with 4.25 IA RNA and TaqMan® gene expression assays (ThermoFisher) for Fam13a (Mm00467910) and Ppib (Mm00478295). As shown in FIGS. 3A-3D, the Fam13a siRNA constructs reduced Fam13a RNA expression in both the liver and adipose tissue.

[0184] 30-Day In Vivo Fam13a siRNA Treatment in Diet-Induced Obese Mice

[0185] Fam13a siRNA's physiological effects were analyzed in the high fat diet (HFD) murine model of diet-induced obesity and insulin resistance after repeated siRNA injection over the course of 30 days. Mice were placed on a HFD for 12 weeks (19 weeks old; n=7 or 8 per group). Mice were then administered a 30 mg/kg dose of a C16 conjugated murine Fam13a siRNA (D-0002 or D-0003), a control C16 siRNA targeting mHprt (C16-Hprt siRNA), or vehicle control (SC) once every 10 days for a total of three doses (see FIG. 4A). Body weight was measured for each mouse at the start of treatment and every 10 days thereafter until the mice were sacrificed thirty days post-injection, when necropsy was performed. Fat mass was measured for each mouse 4 days prior to the first siRNA administration and after 28 days of treatment.

[0186] FIGS. 4B and 4C are plots showing the results of Fam13a siRNA on body weight and fat mass of mice. After 30 days of treatment, both tested Fam13a siRNAs significantly reduced body weight by 11% and fat mass by 20% compared to the controls. These data demonstrate that the C16-conjugated siRNA triggers significantly reduced Fam13a expression in vivo in adipose tissue when conjugated to C16.

[0187] Additionally, liver weight was reduced by −25%, liver triglyceride was reduced by −31%, plasma insulin was reduced by −40%, and plasma LDL was reduced by −17%. These liver-related effects indicate that the C16-conjugated siRNA triggers also were effective in liver tissue.

[0188] 60-Day In Vivo Fam13a siRNA Treatment in Diet-Induced Obese Mice

[0189] An experiment was performed to compare the results using a GalNAc-conjugated Fam13a siRNA (which targets the siRNA specifically to the liver) head-to-head with the results using a C16-conjugated Fam13a siRNA (which targets the siRNA to both adipose tissue and liver). Obese mice were treated with the following molecules every 10 days for 60 days: (1) saline, (2) C16 conjugated non-targeting (NT) siRNA control (30 mg/kg), (3) C16-Fam13a siRNA (D-0002; 30 mg/kg), (4) C16-Fam13a siRNA (D-0002; 5 mg/kg), (5) GalNAc conjugated NT siRNA control (5 mg/kg), or (6) GalNAc-Fam13a siRNA (D-0002; 5 mg/kg).

[0190] After 60 days of treatment, both C16 and GalNAc siRNA treatments significantly reduced body weight, fat mass, liver weight, insulin, total cholesterol, LDL cholesterol, and ALT compared to their respective NT siRNA controls (FIG. 5). The mouse Fam13a×GalNAc siRNA dosed at 5 mg/kg every 10 days for 60 days in obese mice significantly reduced body weight by −15%, fat mass by −22%, liver weight by −49%, insulin by −66%, total cholesterol by −37%, LDL cholesterol by −37%, and ALT by −60%. Of therapeutic importance, GalNAc-Fam13a siRNA (5 mg/kg) treatment was sufficient to significantly reduce all metabolic endpoints to at least approximately the same extent as C16-Fam13a siRNA (30 mg/kg) treatment, which demonstrates that hepatic targeting is sufficient for efficacy of Fam13a siRNA in obese mice. Additionally, GalNAc-Fam13a siRNA significantly reduced total cholesterol to a greater extent than C16-Fam13a siRNA, suggesting that hepatic specific targeting may provide enhanced therapeutic benefit beyond broad targeting by a lipid conjugate and at a 6-fold lower dose.

### Example 3: Selection, Design and Synthesis of Modified FAM13A siRNA Molecules

[0191] Candidate sequences for the design of therapeutic siRNA molecules targeting the human FAM13A gene were identified using a bioinformatics analysis of the human FAM13A transcript provided herein as SEQ ID NO: 1 (Ensembl transcript no. ENST00000264344.9). The bioinformatics analysis included performing informatic analysis of SEQ ID NO: 1, including tiling SEQ ID NO: 1 by triggers of 21 nucleotides in length. To minimize the risk of off target effects, all triggers that were complementary to human micro-RNA and with less than three base pair mismatches to any identified human gene were not prepared for functional testing. In addition, sequences were selected for their ability to cross-react with human and cynomolgus monkey FAM13A mRNA. Based on the results of the bioinformatics analysis, sequences were selected for initial synthesis and in vitro testing.

[0192] Table 1 below lists the unmodified sense and antisense sequences for duplex molecules prioritized from the bioinformatics analysis. The first nucleotide in the range of nucleotides targeted by siRNA molecules in each sequence family within the human FAM13A transcript (SEQ ID NO: 1) is also shown in Table 1.

TABLE 1
siRNA Sequences Directed to FAM13A

| Duplex | Target start in | | SEQ ID | | SEQ ID |
|---|---|---|---|---|---|
| No. | SEQ ID NO: 1 | Sense Sequence (5′-3′) | NO: | Antisense Sequence (5′-3′) | NO: |
| D-1001 | 1282 | CAUGUACCCCAAGUCAGCAAU | 2 | AUUGCUGACUUGGGGUACAUG | 546 |
| D-1002 | 1284 | UGUACCCCAAGUCAGCAAUGU | 3 | ACAUUGCUGACUUGGGGUACA | 547 |
| D-1003 | 1285 | GUACCCCAAGUCAGCAAUGUG | 4 | CACAUUGCUGACUUGGGGUAC | 548 |
| D-1004 | 1298 | GCAAUGUGUCUGCAACCGGAG | 5 | CUCCGGUUGCAGACACAUUGC | 549 |
| D-1005 | 1299 | CAAUGUGUCUGCAACCGGAGA | 6 | UCUCCGGUUGCAGACACAUUG | 550 |
| D-1006 | 1300 | AAUGUGUCUGCAACCGGAGAA | 7 | UUCUCCGGUUGCAGACACAUU | 551 |
| D-1007 | 1302 | UGUGUCUGCAACCGGAGAACU | 8 | AGUUCUCCGGUUGCAGACACA | 552 |
| D-1008 | 1303 | GUGUCUGCAACCGGAGAACUC | 9 | GAGUUCUCCGGUUGCAGACAC | 553 |
| D-1009 | 1304 | UGUCUGCAACCGGAGAACUCU | 10 | AGAGUUCUCCGGUUGCAGACA | 554 |
| D-1010 | 1305 | GUCUGCAACCGGAGAACUCUU | 11 | AAGAGUUCUCCGGUUGCAGAC | 555 |
| D-1794 | | | | | |
| D-1011 | 1306 | UCUGCAACCGGAGAACUCUUA | 12 | UAAGAGUUCUCCGGUUGCAGA | 556 |
| D-1795 | | | | | |
| D-1012 | 1307 | CUGCAACCGGAGAACUCUUAG | 13 | CUAAGAGUUCUCCGGUUGCAG | 557 |
| D-1013 | 1308 | UGCAACCGGAGAACUCUUAGA | 14 | UCUAAGAGUUCUCCGGUUGCA | 558 |
| D-1796 | | | | | |
| D-1014 | 1309 | GCAACCGGAGAACUCUUAGAA | 15 | UUCUAAGAGUUCUCCGGUUGC | 559 |
| D-1545 | | | | | |
| D-1635 | | | | | |
| D-1639 | | | | | |
| D-1640 | | | | | |
| D-1646 | | | | | |
| D-1652 | | | | | |
| D-1657 | | | | | |
| D-1662 | | | | | |
| D-1667 | | | | | |
| D-1670 | | | | | |
| D-1676 | | | | | |
| D-1681 | | | | | |
| D-1686 | | | | | |
| D-1691 | | | | | |
| D-1847 | | | | | |
| D-1849 | | | | | |
| D-1859 | | | | | |
| D-2009 | | | | | |
| D-2018 | | | | | |
| D-1015 | 1311 | AACCGGAGAACUCUUAGAAAG | 16 | CUUUCUAAGAGUUCUCCGGUU | 560 |
| D-1570 | | | | | |
| D-1016 | 1322 | UCUUAGAAAGAACCAUCCGAU | 17 | AUCGGAUGGUUCUUUCUAAGA | 561 |
| D-1017 | 1323 | CUUAGAAAGAACCAUCCGAUC | 18 | GAUCGGAUGGUUCUUUCUAAG | 562 |
| D-1018 | 1324 | UUAGAAAGAACCAUCCGAUCA | 19 | UGAUCGGAUGGUUCUUUCUAA | 563 |
| D-1019 | 1326 | AGAAAGAACCAUCCGAUCAGC | 20 | GCUGAUCGGAUGGUUCUUUCU | 564 |
| D-1817 | | | | | |
| D-1020 | 1328 | AAAGAACCAUCCGAUCAGCUG | 21 | CAGCUGAUCGGAUGGUUCUUU | 565 |
| D-1599 | | | | | |
| D-1021 | 1329 | AAGAACCAUCCGAUCAGCUGU | 22 | ACAGCUGAUCGGAUGGUUCUU | 566 |
| D-1022 | 1331 | GAACCAUCCGAUCAGCUGUAG | 23 | CUACAGCUGAUCGGAUGGUUC | 567 |
| D-1818 | | | | | |
| D-1023 | 1333 | ACCAUCCGAUCAGCUGUAGAA | 24 | UUCUACAGCUGAUCGGAUGGU | 568 |
| D-1597 | | | | | |
| D-1694 | | | | | |
| D-1700 | | | | | |
| D-1707 | | | | | |
| D-1714 | | | | | |
| D-1721 | | | | | |
| D-1728 | | | | | |
| D-1735 | | | | | |
| D-1853 | | | | | |
| D-1873 | | | | | |
| D-2006 | | | | | |
| D-2015 | | | | | |
| D-1024 | 1338 | CCGAUCAGCUGUAGAACAACA | 25 | UGUUGUUCUACAGCUGAUCGG | 569 |
| D-1569 | | | | | |
| D-1025 | 1366 | GAUGUUAAUAACUCUGGAGGU | 26 | ACCUCCAGAGUUAUUAACAUC | 570 |
| D-1543 | | | | | |
| D-1026 | 1371 | UAAUAACUCUGGAGGUCAAAG | 27 | CUUUGACCUCCAGAGUUAUUA | 571 |
| D-1027 | 1373 | AUAACUCUGGAGGUCAAAGUU | 28 | AACUUUGACCUCCAGAGUUAU | 572 |
| D-1028 | 1407 | AUCUGGAACACUAUCAGCAUC | 29 | GAUGCUGAUAGUGUUCCAGAU | 573 |
| D-1819 | | | | | |
| D-1029 | 1472 | AGGAUGAAGUUCGACAUGGGA | 30 | UCCCAUGUCGAACUUCAUCCU | 574 |
| D-1797 | | | | | |
| D-1030 | 1480 | GUUCGACAUGGGAGAGACAAG | 31 | CUUGUCUCUCCCAUGUCGAAC | 575 |
| D-1031 | 1483 | CGACAUGGGAGAGACAAGGGA | 32 | UCCCUUGUCUCUCCCAUGUCG | 576 |
| D-1032 | 1485 | ACAUGGGAGAGACAAGGGACU | 33 | AGUCCCUUGUCUCUCCCAUGU | 577 |
| D-1033 | 1487 | AUGGGAGAGACAAGGGACUUA | 34 | UAAGUCCCUUGUCUCUCCCAU | 578 |
| D-1034 | 1489 | GGGAGAGACAAGGGACUUAUC | 35 | GAUAAGUCCCUUGUCUCUCCC | 579 |
| D-1542 | | | | | |
| D-1035 | 1490 | GGAGAGACAAGGGACUUAUCA | 36 | UGAUAAGUCCCUUGUCUCUCC | 580 |
| D-1036 | 1491 | GAGAGACAAGGGACUUAUCAA | 37 | UUGAUAAGUCCCUUGUCUCUC | 581 |
| D-1037 | 1495 | GACAAGGGACUUAUCAACAAA | 38 | UUUGUUGAUAAGUCCCUUGUC | 582 |
| D-1553 | | | | | |
| D-1038 | 1496 | ACAAGGGACUUAUCAACAAAG | 39 | CUUUGUUGAUAAGUCCCUUGU | 583 |
| D-1589 | | | | | |
| D-1039 | 1500 | GGGACUUAUCAACAAAGAAAA | 40 | UUUUCUUUGUUGAUAAGUCCC | 584 |
| D-1798 | | | | | |
| D-1040 | 1514 | AAGAAAAUACUCCUUCUGGGU | 41 | ACCCAGAAGGAGUAUUUUCUU | 585 |
| D-1820 | | | | | |
| D-1933 | | | | | |
| D-1939 | | | | | |
| D-1945 | | | | | |
| D-1951 | | | | | |
| D-1957 | | | | | |
| D-1963 | | | | | |
| D-1969 | | | | | |
| D-1041 | 1520 | AUACUCCUUCUGGGUUCAACC | 42 | GGUUGAACCCAGAAGGAGUAU | 586 |
| D-1799 | | | | | |
| D-1042 | 1533 | GUUCAACCACCUUGAUGAUUG | 43 | CAAUCAUCAAGGUGGUUGAAC | 587 |
| D-1576 | | | | | |
| D-1043 | 1534 | UUCAACCACCUUGAUGAUUGU | 44 | ACAAUCAUCAAGGUGGUUGAA | 588 |
| D-1616 | | | | | |
| D-1044 | 1558 | UUGAAUACUCAGGAAGUCGAA | 45 | UUCGACUUCCUGAGUAUUCAA | 589 |
| D-1575 | | | | | |
| D-1045 | 1564 | ACUCAGGAAGUCGAAAAGGUA | 46 | UACCUUUUCGACUUCCUGAGU | 590 |
| D-1821 | | | | | |
| D-1046 | 1565 | CUCAGGAAGUCGAAAAGGUAC | 47 | GUACCUUUUCGACUUCCUGAG | 591 |
| D-1047 | 1566 | UCAGGAAGUCGAAAAGGUACA | 48 | UGUACCUUUUCGACUUCCUGA | 592 |
| D-1048 | 1568 | AGGAAGUCGAAAAGGUACACA | 49 | UGUGUACCUUUUCGACUUCCU | 593 |
| D-1049 | 1574 | UCGAAAAGGUACACAAAAAUA | 50 | UAUUUUUGUGUACCUUUUCGA | 594 |
| D-1050 | 1575 | CGAAAAGGUACACAAAAAUAC | 51 | GUAUUUUUGUGUACCUUUUCG | 595 |
| D-1051 | 1610 | GAGAAAGGAGCAAGCCUAAAC | 52 | GUUUAGGCUUGCUCCUUUCUC | 596 |
| D-1052 | 1611 | AGAAAGGAGCAAGCCUAAACG | 53 | CGUUUAGGCUUGCUCCUUUCU | 597 |
| D-1822 | | | | | |
| D-1053 | 1612 | GAAAGGAGCAAGCCUAAACGU | 54 | ACGUUUAGGCUUGCUCCUUUC | 598 |
| D-1054 | 1615 | AGGAGCAAGCCUAAACGUCAG | 55 | CUGACGUUUAGGCUUGCUCCU | 599 |
| D-1823 | | | | | |
| D-1055 | 1616 | GGAGCAAGCCUAAACGUCAGA | 56 | UCUGACGUUUAGGCUUGCUCC | 600 |
| D-1824 | | | | | |
| D-1056 | 1617 | GAGCAAGCCUAAACGUCAGAA | 57 | UUCUGACGUUUAGGCUUGCUC | 601 |
| D-1057 | 1618 | AGCAAGCCUAAACGUCAGAAA | 58 | UUUCUGACGUUUAGGCUUGCU | 602 |
| D-1825 | | | | | |
| D-1058 | 1619 | GCAAGCCUAAACGUCAGAAAU | 59 | AUUUCUGACGUUUAGGCUUGC | 603 |
| D-1574 | | | | | |
| D-1059 | 1620 | CAAGCCUAAACGUCAGAAAUC | 60 | GAUUUCUGACGUUUAGGCUUG | 604 |
| D-1800 | | | | | |
| D-1060 | 1621 | AAGCCUAAACGUCAGAAAUCC | 61 | GGAUUUCUGACGUUUAGGCUU | 605 |
| D-1801 | | | | | |
| D-1061 | 1631 | GUCAGAAAUCCAGUACUAAAC | 62 | GUUUAGUACUGGAUUUCUGAC | 606 |
| D-1610 | | | | | |
| D-1062 | 1632 | UCAGAAAUCCAGUACUAAACU | 63 | AGUUUAGUACUGGAUUUCUGA | 607 |
| D-1554 | | | | | |
| D-1063 | 1652 | UUUCUGAGCUUCAUGACAAUC | 64 | GAUUGUCAUGAAGCUCAGAAA | 608 |
| D-1064 | 1658 | AGCUUCAUGACAAUCAGGACG | 65 | CGUCCUGAUUGUCAUGAAGCU | 609 |
| D-1065 | 1661 | UUCAUGACAAUCAGGACGGUC | 66 | GACCGUCCUGAUUGUCAUGAA | 610 |
| D-1066 | 1662 | UCAUGACAAUCAGGACGGUCU | 67 | AGACCGUCCUGAUUGUCAUGA | 611 |
| D-1067 | 1663 | CAUGACAAUCAGGACGGUCUU | 68 | AAGACCGUCCUGAUUGUCAUG | 612 |
| D-1068 | 1664 | AUGACAAUCAGGACGGUCUUG | 69 | CAAGACCGUCCUGAUUGUCAU | 613 |
| D-1069 | 1665 | UGACAAUCAGGACGGUCUUGU | 70 | ACAAGACCGUCCUGAUUGUCA | 614 |
| D-1070 | 1666 | GACAAUCAGGACGGUCUUGUG | 71 | CACAAGACCGUCCUGAUUGUC | 615 |
| D-1607 | | | | | |
| D-1071 | 1667 | ACAAUCAGGACGGUCUUGUGA | 72 | UCACAAGACCGUCCUGAUUGU | 616 |
| D-1072 | 1669 | AAUCAGGACGGUCUUGUGAAU | 73 | AUUCACAAGACCGUCCUGAUU | 617 |
| D-1073 | 1670 | AUCAGGACGGUCUUGUGAAUA | 74 | UAUUCACAAGACCGUCCUGAU | 618 |
| D-1074 | 1671 | UCAGGACGGUCUUGUGAAUAU | 75 | AUAUUCACAAGACCGUCCUGA | 619 |
| D-1609 | | | | | |
| D-1075 | 1678 | GGUCUUGUGAAUAUGGAAAGU | 76 | ACUUUCCAUAUUCACAAGACC | 620 |
| D-1615 | | | | | |
| D-1695 | | | | | |
| D-1701 | | | | | |
| D-1708 | | | | | |
| D-1715 | | | | | |
| D-1722 | | | | | |
| D-1729 | | | | | |
| D-1736 | | | | | |
| D-1852 | | | | | |
| D-1867 | | | | | |
| D-2007 | | | | | |
| D-2016 | | | | | |
| D-1076 | 1693 | GAAAGUCUCAAUUCCACACGA | 77 | UCGUGUGGAAUUGAGACUUUC | 621 |
| D-1826 | | | | | |
| D-1077 | 1694 | AAAGUCUCAAUUCCACACGAU | 78 | AUCGUGUGGAAUUGAGACUUU | 622 |
| D-1078 | 1695 | AAGUCUCAAUUCCACACGAUC | 79 | GAUCGUGUGGAAUUGAGACUU | 623 |
| D-1079 | 1696 | AGUCUCAAUUCCACACGAUCU | 80 | AGAUCGUGUGGAAUUGAGACU | 624 |
| D-1080 | 1697 | GUCUCAAUUCCACACGAUCUC | 81 | GAGAUCGUGUGGAAUUGAGAC | 625 |
| D-1827 | | | | | |
| D-1081 | 1698 | UCUCAAUUCCACACGAUCUCA | 82 | UGAGAUCGUGUGGAAUUGAGA | 626 |
| D-1605 | | | | | |
| D-1082 | 1699 | CUCAAUUCCACACGAUCUCAU | 83 | AUGAGAUCGUGUGGAAUUGAG | 627 |
| D-1083 | 1700 | UCAAUUCCACACGAUCUCAUG | 84 | CAUGAGAUCGUGUGGAAUUGA | 628 |
| D-1828 | | | | | |
| D-1084 | 1701 | CAAUUCCACACGAUCUCAUGA | 85 | UCAUGAGAUCGUGUGGAAUUG | 629 |
| D-1829 | | | | | |
| D-1085 | 1703 | AUUCCACACGAUCUCAUGAGA | 86 | UCUCAUGAGAUCGUGUGGAAU | 630 |
| D-1830 | | | | | |
| D-1086 | 1704 | UUCCACACGAUCUCAUGAGAG | 87 | CUCUCAUGAGAUCGUGUGGAA | 631 |
| D-1831 | | | | | |
| D-1087 | 1705 | UCCACACGAUCUCAUGAGAGA | 88 | UCUCUCAUGAGAUCGUGUGGA | 632 |
| D-1606 | | | | | |
| D-1088 | 1709 | CACGAUCUCAUGAGAGAACUG | 89 | CAGUUCUCUCAUGAGAUCGUG | 633 |
| D-1089 | 1714 | UCUCAUGAGAGAACUGGACCU | 90 | AGGUCCAGUUCUCUCAUGAGA | 634 |
| D-1090 | 1716 | UCAUGAGAGAACUGGACCUGA | 91 | UCAGGUCCAGUUCUCUCAUGA | 635 |
| D-1832 | | | | | |
| D-1091 | 1717 | CAUGAGAGAACUGGACCUGAU | 92 | AUCAGGUCCAGUUCUCUCAUG | 636 |
| D-1833 | | | | | |
| D-1092 | 1742 | UUGAAUGGAUGUCUGAUGAAA | 93 | UUUCAUCAGACAUCCAUUCAA | 637 |
| D-1093 | 1783 | GGUGGACACACUCAGCAUUUU | 94 | AAAAUGCUGAGUGUGUCCACC | 638 |
| D-1802 | | | | | |
| D-1094 | 1801 | UUUGAGAGCCCCACAAUGAAG | 95 | CUUCAUUGUGGGGCUCUCAAA | 639 |
| D-1587 | | | | | |
| D-1095 | 1832 | AUCCCAGCCUAUCUGACACCA | 96 | UGGUGUCAGAUAGGCUGGGAU | 640 |
| D-1834 | | | | | |
| D-1096 | 1833 | UCCCAGCCUAUCUGACACCAA | 97 | UUGGUGUCAGAUAGGCUGGGA | 641 |
| D-1835 | | | | | |
| D-1097 | 1834 | CCCAGCCUAUCUGACACCAAA | 98 | UUUGGUGUCAGAUAGGCUGGG | 642 |
| D-1836 | | | | | |
| D-1098 | 1835 | CCAGCCUAUCUGACACCAAAC | 99 | GUUUGGUGUCAGAUAGGCUGG | 643 |
| D-1099 | 1836 | CAGCCUAUCUGACACCAAACA | 100 | UGUUUGGUGUCAGAUAGGCUG | 644 |
| D-1100 | 1856 | AGCAGAGAAAUCAAGAUGCCG | 101 | CGGCAUCUUGAUUUCUCUGCU | 645 |
| D-1837 | | | | | |
| D-1101 | 1890 | GAGCUUUGUCUCCGAAGUGCC | 102 | GGCACUUCGGAGACAAAGCUC | 646 |
| D-1803 | | | | | |
| D-1102 | 1896 | UGUCUCCGAAGUGCCCCAGUC | 103 | GACUGGGGCACUUCGGAGACA | 647 |
| D-1563 | | | | | |
| D-1804 | | | | | |
| D-1103 | 1899 | CUCCGAAGUGCCCCAGUCGGA | 104 | UCCGACUGGGGCACUUCGGAG | 648 |
| D-1104 | 1900 | UCCGAAGUGCCCCAGUCGGAC | 105 | GUCCGACUGGGGCACUUCGGA | 649 |
| D-1838 | | | | | |
| D-1105 | 1943 | AGAACUGGGAAGAGCCUAUCC | 106 | GGAUAGGCUCUUCCCAGUUCU | 650 |
| D-1106 | 1944 | GAACUGGGAAGAGCCUAUCCC | 107 | GGGAUAGGCUCUUCCCAGUUC | 651 |
| D-1107 | 1952 | AAGAGCCUAUCCCUGCUUUCU | 108 | AGAAAGCAGGGAUAGGCUCUU | 652 |
| D-1608 | | | | | |
| D-1108 | 2024 | AGGCUGGGCGCCUGAUCCGUC | 109 | GACGGAUCAGGCGCCCAGCCU | 653 |
| D-1109 | 2025 | GGCUGGGCGCCUGAUCCGUCA | 110 | UGACGGAUCAGGCGCCCAGCC | 654 |
| D-1110 | 2026 | GCUGGGCGCCUGAUCCGUCAG | 111 | CUGACGGAUCAGGCGCCCAGC | 655 |
| D-1111 | 2027 | CUGGGCGCCUGAUCCGUCAGC | 112 | GCUGACGGAUCAGGCGCCCAG | 656 |
| D-1112 | 2028 | UGGGCGCCUGAUCCGUCAGCU | 113 | AGCUGACGGAUCAGGCGCCCA | 657 |
| D-1113 | 2050 | CUGGACGAAGACAGCGACCCC | 114 | GGGGUCGCUGUCUUCGUCCAG | 658 |
| D-2094 | 2055 | CGAAGACAGCGACCCCAUGCU | 2807 | AGCAUGGGGUCGCUGUCUUCG | 2808 |
| D-1114 | 2066 | ACCCCAUGCUCUCUCCUCGGU | 115 | ACCGAGGAGAGAGCAUGGGGU | 659 |
| D-1568 | | | | | |
| D-1115 | 2070 | CAUGCUCUCUCCUCGGUUCUA | 116 | UAGAACCGAGGAGAGAGCAUG | 660 |
| D-1567 | | | | | |
| D-1116 | 2071 | AUGCUCUCUCCUCGGUUCUAC | 117 | GUAGAACCGAGGAGAGAGCAU | 661 |
| D-1805 | | | | | |
| D-1117 | 2073 | GCUCUCUCCUCGGUUCUACGC | 118 | GCGUAGAACCGAGGAGAGAGC | 662 |
| D-1118 | 2074 | CUCUCUCCUCGGUUCUACGCU | 119 | AGCGUAGAACCGAGGAGAGAG | 663 |
| D-1119 | 2075 | UCUCUCCUCGGUUCUACGCUU | 120 | AAGCGUAGAACCGAGGAGAGA | 664 |
| D-1601 | | | | | |
| D-1120 | 2076 | CUCUCCUCGGUUCUACGCUUA | 121 | UAAGCGUAGAACCGAGGAGAG | 665 |
| D-1121 | 2077 | UCUCCUCGGUUCUACGCUUAU | 122 | AUAAGCGUAGAACCGAGGAGA | 666 |
| D-1122 | 2078 | CUCCUCGGUUCUACGCUUAUG | 123 | CAUAAGCGUAGAACCGAGGAG | 667 |
| D-1550 | | | | | |
| D-1123 | 2079 | UCCUCGGUUCUACGCUUAUGG | 124 | CCAUAAGCGUAGAACCGAGGA | 668 |
| D-1124 | 2080 | CCUCGGUUCUACGCUUAUGGG | 125 | CCCAUAAGCGUAGAACCGAGG | 669 |
| D-1549 | | | | | |
| D-1643 | | | | | |
| D-1647 | | | | | |
| D-1651 | | | | | |
| D-1656 | | | | | |
| D-1661 | | | | | |
| D-1666 | | | | | |
| D-1671 | | | | | |
| D-1675 | | | | | |
| D-1680 | | | | | |
| D-1685 | | | | | |
| D-1690 | | | | | |
| D-1848 | | | | | |
| D-1860 | | | | | |
| D-1125 | 2081 | CUCGGUUCUACGCUUAUGGGC | 126 | GCCCAUAAGCGUAGAACCGAG | 670 |
| D-1126 | 2144 | CACCAAACUCCCAUUCUUUCA | 127 | UGAAAGAAUGGGAGUUUGGUG | 671 |
| D-1544 | | | | | |
| D-1636 | | | | | |
| D-1648 | | | | | |
| D-1653 | | | | | |
| D-1658 | | | | | |
| D-1663 | | | | | |
| D-1668 | | | | | |
| D-1672 | | | | | |
| D-1677 | | | | | |
| D-1682 | | | | | |
| D-1687 | | | | | |
| D-1692 | | | | | |
| D-1851 | | | | | |
| D-1858 | | | | | |
| D-2010 | | | | | |
| D-2019 | | | | | |
| D-1127 | 2146 | CCAAACUCCCAUUCUUUCAUG | 128 | CAUGAAAGAAUGGGAGUUUGG | 672 |
| D-1565 | | | | | |
| D-1641 | | | | | |
| D-1128 | 2151 | CUCCCAUUCUUUCAUGAGGCG | 129 | CGCCUCAUGAAAGAAUGGGAG | 673 |
| D-1539 | | | | | |
| D-1129 | 2155 | CAUUCUUUCAUGAGGCGGCGA | 130 | UCGCCGCCUCAUGAAAGAAUG | 674 |
| D-1130 | 2156 | AUUCUUUCAUGAGGCGGCGAA | 131 | UUCGCCGCCUCAUGAAAGAAU | 675 |
| D-1131 | 2157 | UUCUUUCAUGAGGCGGCGAAG | 132 | CUUCGCCGCCUCAUGAAAGAA | 676 |
| D-1132 | 2158 | UCUUUCAUGAGGCGGCGAAGC | 133 | GCUUCGCCGCCUCAUGAAAGA | 677 |
| D-1133 | 2159 | CUUUCAUGAGGCGGCGAAGCU | 134 | AGCUUCGCCGCCUCAUGAAAG | 678 |
| D-1134 | 2160 | UUUCAUGAGGCGGCGAAGCUC | 135 | GAGCUUCGCCGCCUCAUGAAA | 679 |
| D-1135 | 2182 | UCUCUGGGGUCCUAUGAUGAU | 136 | AUCAUCAUAGGACCCCAGAGA | 680 |
| D-1136 | 2218 | ACACCUGCCCAGCUCACACGA | 137 | UCGUGUGAGCUGGGCAGGUGU | 681 |
| D-1137 | 2219 | CACCUGCCCAGCUCACACGAA | 138 | UUCGUGUGAGCUGGGCAGGUG | 682 |
| D-1138 | 2221 | CCUGCCCAGCUCACACGAAGG | 139 | CCUUCGUGUGAGCUGGGCAGG | 683 |
| D-1139 | 2226 | CCAGCUCACACGAAGGAUUCA | 140 | UGAAUCCUUCGUGUGAGCUGG | 684 |
| D-1140 | 2228 | AGCUCACACGAAGGAUUCAGA | 141 | UCUGAAUCCUUCGUGUGAGCU | 685 |
| D-1806 | | | | | |
| D-1141 | 2263 | AUCCGGAAGUUUGAAGAUAGA | 142 | UCUAUCUUCAAACUUCCGGAU | 686 |
| D-1573 | | | | | |
| D-1638 | | | | | |
| D-1644 | | | | | |
| D-1645 | | | | | |
| D-2024 | | | | | |
| D-2025 | | | | | |
| D-2026 | | | | | |
| D-2027 | | | | | |
| D-2028 | | | | | |
| D-2029 | | | | | |
| D-2030 | | | | | |
| D-2031 | | | | | |
| D-2032 | | | | | |
| D-2033 | | | | | |
| D-2034 | | | | | |
| D-1142 | 2266 | CGGAAGUUUGAAGAUAGAUUC | 143 | GAAUCUAUCUUCAAACUUCCG | 687 |
| D-1547 | | | | | |
| D-1143 | 2270 | AGUUUGAAGAUAGAUUCGAAG | 144 | CUUCGAAUCUAUCUUCAAACU | 688 |
| D-1602 | | | | | |
| D-1144 | 2271 | GUUUGAAGAUAGAUUCGAAGA | 145 | UCUUCGAAUCUAUCUUCAAAC | 689 |
| D-1145 | 2275 | GAAGAUAGAUUCGAAGAAGAG | 146 | CUCUUCUUCGAAUCUAUCUUC | 690 |
| D-1839 | | | | | |
| D-1146 | 2294 | AGAAGAAGUACAGACCUUCCC | 147 | GGGAAGGUCUGUACUUCUUCU | 691 |
| D-1807 | | | | | |
| D-1147 | 2295 | GAAGAAGUACAGACCUUCCCA | 148 | UGGGAAGGUCUGUACUUCUUC | 692 |
| D-1808 | | | | | |
| D-1148 | 2296 | AAGAAGUACAGACCUUCCCAC | 149 | GUGGGAAGGUCUGUACUUCUU | 693 |
| D-1809 | | | | | |
| D-1149 | 2343 | UCUGAAAUGGACAAAUGACCU | 150 | AGGUCAUUUGUCCAUUUCAGA | 694 |
| D-1810 | | | | | |
| D-1938 | | | | | |
| D-1944 | | | | | |
| D-1950 | | | | | |
| D-1956 | | | | | |
| D-1962 | | | | | |
| D-1968 | | | | | |
| D-1974 | | | | | |
| D-2035 | | | | | |
| D-2055 | | | | | |
| D-2056 | | | | | |
| D-1150 | 2344 | CUGAAAUGGACAAAUGACCUU | 151 | AAGGUCAUUUGUCCAUUUCAG | 695 |
| D-1613 | | | | | |
| D-1151 | 2353 | ACAAAUGACCUUGCCAAAUUC | 152 | GAAUUUGGCAAGGUCAUUUGU | 696 |
| D-1598 | | | | | |
| D-1152 | 2355 | AAAUGACCUUGCCAAAUUCCG | 153 | CGGAAUUUGGCAAGGUCAUUU | 697 |
| D-1811 | | | | | |
| D-1153 | 2356 | AAUGACCUUGCCAAAUUCCGG | 154 | CCGGAAUUUGGCAAGGUCAUU | 698 |
| D-1556 | | | | | |
| D-1154 | 2358 | UGACCUUGCCAAAUUCCGGAG | 155 | CUCCGGAAUUUGGCAAGGUCA | 699 |
| D-1595 | | | | | |
| D-1155 | 2359 | GACCUUGCCAAAUUCCGGAGA | 156 | UCUCCGGAAUUUGGCAAGGUC | 700 |
| D-1156 | 2360 | ACCUUGCCAAAUUCCGGAGAC | 157 | GUCUCCGGAAUUUGGCAAGGU | 701 |
| D-1578 | | | | | |
| D-1157 | 2361 | CCUUGCCAAAUUCCGGAGACA | 158 | UGUCUCCGGAAUUUGGCAAGG | 702 |
| D-1158 | 2373 | CCGGAGACAACUUAAAGAAUC | 159 | GAUUCUUUAAGUUGUCUCCGG | 703 |
| D-1159 | 2374 | CGGAGACAACUUAAAGAAUCA | 160 | UGAUUCUUUAAGUUGUCUCCG | 704 |
| D-1160 | 2402 | AGAUAUCUGAAGAGGACCUAA | 161 | UUAGGUCCUCUUCAGAUAUCU | 705 |
| D-1161 | 2413 | GAGGACCUAACUCCCAGGAUG | 162 | CAUCCUGGGAGUUAGGUCCUC | 706 |
| D-1162 | 2416 | GACCUAACUCCCAGGAUGCGG | 163 | CCGCAUCCUGGGAGUUAGGUC | 707 |
| D-1163 | 2417 | ACCUAACUCCCAGGAUGCGGC | 164 | GCCGCAUCCUGGGAGUUAGGU | 708 |
| D-1812 | | | | | |
| D-1935 | | | | | |
| D-1941 | | | | | |
| D-1947 | | | | | |
| D-1953 | | | | | |
| D-1959 | | | | | |
| D-1965 | | | | | |
| D-1971 | | | | | |
| D-1164 | 2432 | UGCGGCAGCGAAGCAACACAC | 165 | GUGUGUUGCUUCGCUGCCGCA | 709 |
| D-1813 | | | | | |
| D-1165 | 2433 | GCGGCAGCGAAGCAACACACU | 166 | AGUGUGUUGCUUCGCUGCCGC | 710 |
| D-1166 | 2437 | CAGCGAAGCAACACACUCCCC | 167 | GGGGAGUGUGUUGCUUCGCUG | 711 |
| D-1840 | | | | | |
| D-1167 | 2439 | GCGAAGCAACACACUCCCCAA | 168 | UUGGGGAGUGUGUUGCUUCGC | 712 |
| D-1841 | | | | | |
| D-1168 | 2444 | GCAACACACUCCCCAAGAGUU | 169 | AACUCUUGGGGAGUGUGUUGC | 713 |
| D-1169 | 2457 | CAAGAGUUUUGGUUCCCAACU | 170 | AGUUGGGAACCAAAACUCUUG | 714 |
| D-1170 | 2460 | GAGUUUUGGUUCCCAACUUGA | 171 | UCAAGUUGGGAACCAAAACUC | 715 |
| D-1171 | 2462 | GUUUUGGUUCCCAACUUGAGA | 172 | UCUCAAGUUGGGAACCAAAAC | 716 |
| D-1592 | | | | | |
| D-1172 | 2534 | UUGAAGCCACAUUGGAAUCUA | 173 | UAGAUUCCAAUGUGGCUUCAA | 717 |
| D-1842 | | | | | |
| D-1173 | 2568 | CCAGGAGAAGCGAGCGGAAAG | 174 | CUUUCCGCUCGCUUCUCCUGG | 718 |
| D-1174 | 2623 | GACCAGAUUGCUAAUGAGAAA | 175 | UUUCUCAUUAGCAAUCUGGUC | 719 |
| D-1581 | | | | | |
| D-1175 | 2632 | GCUAAUGAGAAAGUGGCUCUG | 176 | CAGAGCCACUUUCUCAUUAGC | 720 |
| D-1621 | | | | | |
| D-1176 | 2677 | AGCAUUCAUGGACGGCCGGUA | 177 | UACCGGCCGUCCAUGAAUGCU | 721 |
| D-1177 | 2678 | GCAUUCAUGGACGGCCGGUAA | 178 | UUACCGGCCGUCCAUGAAUGC | 722 |
| D-1178 | 2679 | CAUUCAUGGACGGCCGGUAAC | 179 | GUUACCGGCCGUCCAUGAAUG | 723 |
| D-1179 | 2680 | AUUCAUGGACGGCCGGUAACA | 180 | UGUUACCGGCCGUCCAUGAAU | 724 |
| D-1180 | 2681 | UUCAUGGACGGCCGGUAACAA | 181 | UUGUUACCGGCCGUCCAUGAA | 725 |
| D-1181 | 2682 | UCAUGGACGGCCGGUAACAAA | 182 | UUUGUUACCGGCCGUCCAUGA | 726 |
| D-2095 | 2683 | CAUGGACGGCCGGUAACAAAG | 2809 | CUUUGUUACCGGCCGUCCAUG | 2810 |
| D-1182 | 2684 | AUGGACGGCCGGUAACAAAGA | 183 | UCUUUGUUACCGGCCGUCCAU | 727 |
| D-1183 | 2685 | UGGACGGCCGGUAACAAAGAA | 184 | UUCUUUGUUACCGGCCGUCCA | 728 |
| D-1184 | 2686 | GGACGGCCGGUAACAAAGAAC | 185 | GUUCUUUGUUACCGGCCGUCC | 729 |
| D-1185 | 2688 | ACGGCCGGUAACAAAGAACGA | 186 | UCGUUCUUUGUUACCGGCCGU | 730 |
| D-1814 | | | | | |
| D-1186 | 2689 | CGGCCGGUAACAAAGAACGAA | 187 | UUCGUUCUUUGUUACCGGCCG | 731 |
| D-1187 | 2690 | GGCCGGUAACAAAGAACGAAC | 188 | GUUCGUUCUUUGUUACCGGCC | 732 |
| D-1815 | | | | | |
| D-1188 | 2691 | GCCGGUAACAAAGAACGAACG | 189 | CGUUCGUUCUUUGUUACCGGC | 733 |
| D-1189 | 2692 | CCGGUAACAAAGAACGAACGG | 190 | CCGUUCGUUCUUUGUUACCGG | 734 |
| D-1190 | 2693 | CGGUAACAAAGAACGAACGGC | 191 | GCCGUUCGUUCUUUGUUACCG | 735 |
| D-1843 | | | | | |
| D-1191 | 2694 | GGUAACAAAGAACGAACGGCA | 192 | UGCCGUUCGUUCUUUGUUACC | 736 |
| D-1192 | 2700 | AAAGAACGAACGGCAGGUGAU | 193 | AUCACCUGCCGUUCGUUCUUU | 737 |
| D-1193 | 2719 | AUGAAGCCACUAUACGACAGG | 194 | CCUGUCGUAUAGUGGCUUCAU | 738 |
| D-1844 | | | | | |
| D-1194 | 2721 | GAAGCCACUAUACGACAGGUA | 195 | UACCUGUCGUAUAGUGGCUUC | 739 |
| D-1195 | 2722 | AAGCCACUAUACGACAGGUAC | 196 | GUACCUGUCGUAUAGUGGCUU | 740 |
| D-1196 | 2723 | AGCCACUAUACGACAGGUACC | 197 | GGUACCUGUCGUAUAGUGGCU | 741 |
| D-1197 | 2724 | GCCACUAUACGACAGGUACCG | 198 | CGGUACCUGUCGUAUAGUGGC | 742 |
| D-1198 | 2725 | CCACUAUACGACAGGUACCGG | 199 | CCGGUACCUGUCGUAUAGUGG | 743 |
| D-1199 | 2726 | CACUAUACGACAGGUACCGGC | 200 | GCCGGUACCUGUCGUAUAGUG | 744 |
| D-1845 | | | | | |
| D-1200 | 2727 | ACUAUACGACAGGUACCGGCU | 201 | AGCCGGUACCUGUCGUAUAGU | 745 |
| D-1201 | 2753 | AACAGAUCCUCUCCCGAGCUA | 202 | UAGCUCGGGAGAGGAUCUGUU | 746 |
| D-1202 | 2754 | ACAGAUCCUCUCCCGAGCUAA | 203 | UUAGCUCGGGAGAGGAUCUGU | 747 |
| D-1203 | 2756 | AGAUCCUCUCCCGAGCUAACA | 204 | UGUUAGCUCGGGAGAGGAUCU | 748 |
| D-1204 | 2759 | UCCUCUCCCGAGCUAACACCA | 205 | UGGUGUUAGCUCGGGAGAGGA | 749 |
| D-1205 | 2760 | CCUCUCCCGAGCUAACACCAU | 206 | AUGGUGUUAGCUCGGGAGAGG | 750 |
| D-1206 | 2761 | CUCUCCCGAGCUAACACCAUA | 207 | UAUGGUGUUAGCUCGGGAGAG | 751 |
| D-1207 | 2764 | UCCCGAGCUAACACCAUACCC | 208 | GGGUAUGGUGUUAGCUCGGGA | 752 |
| D-1208 | 2765 | CCCGAGCUAACACCAUACCCA | 209 | UGGGUAUGGUGUUAGCUCGGG | 753 |
| D-1209 | 2886 | GGGGUCAGAAGACGAUAGCAA | 210 | UUGCUAUCGUCUUCUGACCCC | 754 |
| D-1816 | | | | | |
| D-1210 | 2887 | GGGUCAGAAGACGAUAGCAAU | 211 | AUUGCUAUCGUCUUCUGACCC | 755 |
| D-1561 | | | | | |
| D-1211 | 2889 | GUCAGAAGACGAUAGCAAUGU | 212 | ACAUUGCUAUCGUCUUCUGAC | 756 |
| D-1620 | | | | | |
| D-1212 | 2890 | UCAGAAGACGAUAGCAAUGUG | 213 | CACAUUGCUAUCGUCUUCUGA | 757 |
| D-1560 | | | | | |
| D-1213 | 2893 | GAAGACGAUAGCAAUGUGAAG | 214 | CUUCACAUUGCUAUCGUCUUC | 758 |
| D-1559 | | | | | |
| D-1214 | 2895 | AGACGAUAGCAAUGUGAAGCC | 215 | GGCUUCACAUUGCUAUCGUCU | 759 |
| D-1558 | | | | | |
| D-1215 | 2923 | AUGGUCACUCUGAAAACCGAU | 216 | AUCGGUUUUCAGAGUGACCAU | 760 |
| D-1604 | | | | | |
| D-1216 | 2924 | UGGUCACUCUGAAAACCGAUU | 217 | AAUCGGUUUUCAGAGUGACCA | 761 |
| D-1217 | 2925 | GGUCACUCUGAAAACCGAUUU | 218 | AAAUCGGUUUUCAGAGUGACC | 762 |
| D-1218 | 2934 | GAAAACCGAUUUCAGUGCACG | 219 | CGUGCACUGAAAUCGGUUUUC | 763 |
| D-1541 | | | | | |
| D-1219 | 2937 | AACCGAUUUCAGUGCACGAUG | 220 | CAUCGUGCACUGAAAUCGGUU | 764 |
| D-1588 | | | | | |
| D-1220 | 2994 | UAUUUCCCCAAUGGAUGAUAA | 221 | UUAUCAUCCAUUGGGGAAAUA | 765 |
| D-1619 | | | | | |
| D-1221 | 3000 | CCCAAUGGAUGAUAAAAUACC | 222 | GGUAUUUUAUCAUCCAUUGGG | 766 |
| D-1557 | | | | | |
| D-1642 | | | | | |
| D-1650 | | | | | |
| D-1655 | | | | | |
| D-1660 | | | | | |
| D-1665 | | | | | |
| D-1674 | | | | | |
| D-1679 | | | | | |
| D-1684 | | | | | |
| D-1689 | | | | | |
| D-1850 | | | | | |
| D-1861 | | | | | |
| D-1222 | 3002 | CAAUGGAUGAUAAAAUACCAU | 223 | AUGGUAUUUUAUCAUCCAUUG | 767 |
| D-1579 | | | | | |
| D-1223 | 3005 | UGGAUGAUAAAAUACCAUCAA | 224 | UUGAUGGUAUUUUAUCAUCCA | 768 |
| D-1224 | 3014 | AAAUACCAUCAAAAUGCAGCC | 225 | GGCUGCAUUUUGAUGGUAUUU | 769 |
| D-1555 | | | | | |
| D-1225 | 3043 | GGGCUUUCAAAUCUCCAUGCU | 226 | AGCAUGGAGAUUUGAAAGCCC | 770 |
| D-1226 | 3044 | GGCUUUCAAAUCUCCAUGCUG | 227 | CAGCAUGGAGAUUUGAAAGCC | 771 |
| D-1227 | 3052 | AAUCUCCAUGCUGCCUCAAUA | 228 | UAUUGAGGCAGCAUGGAGAUU | 772 |
| D-1228 | 3053 | AUCUCCAUGCUGCCUCAAUAC | 229 | GUAUUGAGGCAGCAUGGAGAU | 773 |
| D-1229 | 3054 | UCUCCAUGCUGCCUCAAUACC | 230 | GGUAUUGAGGCAGCAUGGAGA | 774 |
| D-1230 | 3062 | CUGCCUCAAUACCUGAACUCC | 231 | GGAGUUCAGGUAUUGAGGCAG | 775 |
| D-1231 | 3082 | CUGGAACACCUCCAGGAAAUG | 232 | CAUUUCCUGGAGGUGUUCCAG | 776 |
| D-1232 | 3133 | CUUCGGGAUUUUGAAGACAAC | 233 | GUUGUCUUCAAAAUCCCGAAG | 777 |
| D-1586 | | | | | |
| D-1637 | | | | | |
| D-1649 | | | | | |
| D-1654 | | | | | |
| D-1659 | | | | | |
| D-1664 | | | | | |
| D-1669 | | | | | |
| D-1673 | | | | | |
| D-1678 | | | | | |
| D-1683 | | | | | |
| D-1688 | | | | | |
| D-1693 | | | | | |
| D-1233 | 3180 | CCAGAAGGAAGACCGCACUCC | 234 | GGAGUGCGGUCUUCCUUCUGG | 778 |
| D-1234 | 3183 | GAAGGAAGACCGCACUCCUAU | 235 | AUAGGAGUGCGGUCUUCCUUC | 779 |
| D-1235 | 3184 | AAGGAAGACCGCACUCCUAUG | 236 | CAUAGGAGUGCGGUCUUCCUU | 780 |
| D-1540 | | | | | |
| D-1236 | 3185 | AGGAAGACCGCACUCCUAUGG | 237 | CCAUAGGAGUGCGGUCUUCCU | 781 |
| D-1237 | 3186 | GGAAGACCGCACUCCUAUGGC | 238 | GCCAUAGGAGUGCGGUCUUCC | 782 |
| D-1238 | 3187 | GAAGACCGCACUCCUAUGGCU | 239 | AGCCAUAGGAGUGCGGUCUUC | 783 |
| D-1552 | | | | | |
| D-1239 | 3189 | AGACCGCACUCCUAUGGCUGA | 240 | UCAGCCAUAGGAGUGCGGUCU | 784 |
| D-1618 | | | | | |
| D-1240 | 3192 | CCGCACUCCUAUGGCUGAAGA | 241 | UCUUCAGCCAUAGGAGUGCGG | 785 |
| D-1585 | | | | | |
| D-1241 | 3225 | UAAGCACAUAAAGGCGAAACU | 242 | AGUUUCGCCUUUAUGUGCUUA | 786 |
| D-1242 | 3226 | AAGCACAUAAAGGCGAAACUG | 243 | CAGUUUCGCCUUUAUGUGCUU | 787 |
| D-1243 | 3228 | GCACAUAAAGGCGAAACUGAG | 244 | CUCAGUUUCGCCUUUAUGUGC | 788 |
| D-1244 | 3283 | GAUUCCAAGUCCAUGUGAGGG | 245 | CCCUCACAUGGACUUGGAAUC | 789 |
| D-1584 | | | | | |
| D-1245 | 3284 | AUUCCAAGUCCAUGUGAGGGG | 246 | CCCCUCACAUGGACUUGGAAU | 790 |
| D-1246 | 3287 | CCAAGUCCAUGUGAGGGGCAU | 247 | AUGCCCCUCACAUGGACUUGG | 791 |
| D-1247 | 3288 | CAAGUCCAUGUGAGGGGCAUG | 248 | CAUGCCCCUCACAUGGACUUG | 792 |
| D-1248 | 3291 | GUCCAUGUGAGGGGCAUGGCC | 249 | GGCCAUGCCCCUCACAUGGAC | 793 |
| D-1249 | 3327 | GCAGCUGCGGUGAGAGUUUAC | 250 | GUAAACUCUCACCGCAGCUGC | 794 |
| D-1250 | 3329 | AGCUGCGGUGAGAGUUUACUG | 251 | CAGUAAACUCUCACCGCAGCU | 795 |
| D-1251 | 3352 | CCCAGAGAAAGUGCAGCUCUG | 252 | CAGAGCUGCACUUUCUCUGGG | 796 |
| D-1252 | 3398 | CAAAGCAUGCAGCCCUUCUGC | 253 | GCAGAAGGGCUGCAUGCUUUG | 797 |
| D-1253 | 3411 | CCUUCUGCCUCUAGACCAUUU | 254 | AAAUGGUCUAGAGGCAGAAGG | 798 |
| D-1254 | 3414 | UCUGCCUCUAGACCAUUUGGC | 255 | GCCAAAUGGUCUAGAGGCAGA | 799 |
| D-1255 | 3420 | UCUAGACCAUUUGGCAUCGGC | 256 | GCCGAUGCCAAAUGGUCUAGA | 800 |
| D-1256 | 3421 | CUAGACCAUUUGGCAUCGGCU | 257 | AGCCGAUGCCAAAUGGUCUAG | 801 |
| D-1257 | 3422 | UAGACCAUUUGGCAUCGGCUC | 258 | GAGCCGAUGCCAAAUGGUCUA | 802 |
| D-1258 | 3423 | AGACCAUUUGGCAUCGGCUCC | 259 | GGAGCCGAUGCCAAAUGGUCU | 803 |
| D-1259 | 3429 | UUUGGCAUCGGCUCCUGUUUC | 260 | GAAACAGGAGCCGAUGCCAAA | 804 |
| D-1632 | | | | | |
| D-1260 | 3432 | GGCAUCGGCUCCUGUUUCCAU | 261 | AUGGAAACAGGAGCCGAUGCC | 805 |
| D-1261 | 3436 | UCGGCUCCUGUUUCCAUUGCC | 262 | GGCAAUGGAAACAGGAGCCGA | 806 |
| D-1262 | 3438 | GGCUCCUGUUUCCAUUGCCUG | 263 | CAGGCAAUGGAAACAGGAGCC | 807 |
| D-1580 | | | | | |
| D-1263 | 3498 | UAGGCAUUUUGUAAUUGGAAA | 264 | UUUCCAAUUACAAAAUGCCUA | 808 |
| D-1583 | | | | | |
| D-1264 | 3499 | AGGCAUUUUGUAAUUGGAAAG | 265 | CUUUCCAAUUACAAAAUGCCU | 809 |
| D-1582 | | | | | |
| D-1265 | 3503 | AUUUUGUAAUUGGAAAGUCAA | 266 | UUGACUUUCCAAUUACAAAAU | 810 |
| D-1266 | 3505 | UUUGUAAUUGGAAAGUCAAGA | 267 | UCUUGACUUUCCAAUUACAAA | 811 |
| D-1267 | 3510 | AAUUGGAAAGUCAAGACUGCA | 268 | UGCAGUCUUGACUUUCCAAUU | 812 |
| D-1268 | 3514 | GGAAAGUCAAGACUGCAGUAU | 269 | AUACUGCAGUCUUGACUUUCC | 813 |
| D-1269 | 3519 | GUCAAGACUGCAGUAUGUGCA | 270 | UGCACAUACUGCAGUCUUGAC | 814 |
| D-1270 | 3520 | UCAAGACUGCAGUAUGUGCAC | 271 | GUGCACAUACUGCAGUCUUGA | 815 |
| D-2096 | 3536 | UGCACAUGCGCACGCGCAUGC | 2811 | GCAUGCGCGUGCGCAUGUGCA | 2812 |
| D-2097 | 3537 | GCACAUGCGCACGCGCAUGCA | 2813 | UGCAUGCGCGUGCGCAUGUGC | 2814 |
| D-2098 | 3538 | CACAUGCGCACGCGCAUGCAC | 2815 | GUGCAUGCGCGUGCGCAUGUG | 2816 |
| D-2099 | 3539 | ACAUGCGCACGCGCAUGCACG | 2817 | CGUGCAUGCGCGUGCGCAUGU | 2818 |
| D-1271 | 3565 | ACACACACAGUAGUGGAGCUU | 272 | AAGCUCCACUACUGUGUGUGU | 816 |
| D-1272 | 3568 | CACACAGUAGUGGAGCUUUCC | 273 | GGAAAGCUCCACUACUGUGUG | 817 |
| D-1273 | 3569 | ACACAGUAGUGGAGCUUUCCU | 274 | AGGAAAGCUCCACUACUGUGU | 818 |
| D-1571 | | | | | |
| D- | 3571 | ACAGUAGUGGAGCUUUCCUAA | 275 | UUAGGAAAGCUCCACUACUGU | 819 |
| 1273B | | | | | |
| D-1274 | 3582 | GCUUUCCUAACACUAGCAGAG | 276 | CUCUGCUAGUGUUAGGAAAGC | 820 |
| D-1275 | 3589 | UAACACUAGCAGAGAUUAAUC | 277 | GAUUAAUCUCUGCUAGUGUUA | 821 |
| D-1276 | 3590 | AACACUAGCAGAGAUUAAUCA | 278 | UGAUUAAUCUCUGCUAGUGUU | 822 |
| D-1277 | 3591 | ACACUAGCAGAGAUUAAUCAC | 279 | GUGAUUAAUCUCUGCUAGUGU | 823 |
| D-1278 | 3594 | CUAGCAGAGAUUAAUCACUAC | 280 | GUAGUGAUUAAUCUCUGCUAG | 824 |
| D-1279 | 3599 | AGAGAUUAAUCACUACAUUAG | 281 | CUAAUGUAGUGAUUAAUCUCU | 825 |
| D-1280 | 3611 | CUACAUUAGACAACACUCAUC | 282 | GAUGAGUGUUGUCUAAUGUAG | 826 |
| D-1281 | 3612 | UACAUUAGACAACACUCAUCU | 283 | AGAUGAGUGUUGUCUAAUGUA | 827 |
| D-1282 | 3614 | CAUUAGACAACACUCAUCUAC | 284 | GUAGAUGAGUGUUGUCUAAUG | 828 |
| D-1283 | 3659 | GGAUAACUGAGAAACAAGAGA | 285 | UCUCUUGUUUCUCAGUUAUCC | 829 |
| D-1284 | 3676 | GAGACCAUUCUCUGUCUAACU | 286 | AGUUAGACAGAGAAUGGUCUC | 830 |
| D- | 3687 | CUGUCUAACUGUGAUAAAAAC | 287 | GUUUUUAUCACAGUUAGACAG | 831 |
| 1284B | | | | | |
| D-1285 | 3712 | UCAGGACUUUAUUCUAUAGAG | 288 | CUCUAUAGAAUAAAGUCCUGA | 832 |
| D-1286 | 3717 | ACUUUAUUCUAUAGAGCAAAC | 289 | GUUUGCUCUAUAGAAUAAAGU | 833 |
| D-1617 | | | | | |
| D-1287 | 3720 | UUAUUCUAUAGAGCAAACUUG | 290 | CAAGUUUGCUCUAUAGAAUAA | 834 |
| D-1626 | | | | | |
| D-1288 | 3721 | UAUUCUAUAGAGCAAACUUGC | 291 | GCAAGUUUGCUCUAUAGAAUA | 835 |
| D-1289 | 3723 | UUCUAUAGAGCAAACUUGCUG | 292 | CAGCAAGUUUGCUCUAUAGAA | 836 |
| D-1290 | 3741 | CUGUGGAGGGCCAUGCUCUCC | 293 | GGAGAGCAUGGCCCUCCACAG | 837 |
| D-1291 | 3755 | GCUCUCCUUGGACCCAGUUAA | 294 | UUAACUGGGUCCAAGGAGAGC | 838 |
| D-1292 | 3757 | UCUCCUUGGACCCAGUUAACU | 295 | AGUUAACUGGGUCCAAGGAGA | 839 |
| D-1293 | 3758 | CUCCUUGGACCCAGUUAACUG | 296 | CAGUUAACUGGGUCCAAGGAG | 840 |
| D-1294 | 3760 | CCUUGGACCCAGUUAACUGCA | 297 | UGCAGUUAACUGGGUCCAAGG | 841 |
| D-1295 | 3761 | CUUGGACCCAGUUAACUGCAA | 298 | UUGCAGUUAACUGGGUCCAAG | 842 |
| D-1296 | 3764 | GGACCCAGUUAACUGCAAACG | 299 | CGUUUGCAGUUAACUGGGUCC | 843 |
| D-1297 | 3765 | GACCCAGUUAACUGCAAACGU | 300 | ACGUUUGCAGUUAACUGGGUC | 844 |
| D-1298 | 3766 | ACCCAGUUAACUGCAAACGUG | 301 | CACGUUUGCAGUUAACUGGGU | 845 |
| D-1299 | 3767 | CCCAGUUAACUGCAAACGUGC | 302 | GCACGUUUGCAGUUAACUGGG | 846 |
| D-1300 | 3768 | CCAGUUAACUGCAAACGUGCA | 303 | UGCACGUUUGCAGUUAACUGG | 847 |
| D-1301 | 3769 | CAGUUAACUGCAAACGUGCAU | 304 | AUGCACGUUUGCAGUUAACUG | 848 |
| D-1302 | 3772 | UUAACUGCAAACGUGCAUUGG | 305 | CCAAUGCACGUUUGCAGUUAA | 849 |
| D-1303 | 3776 | CUGCAAACGUGCAUUGGAGCC | 306 | GGCUCCAAUGCACGUUUGCAG | 850 |
| D-1304 | 3777 | UGCAAACGUGCAUUGGAGCCC | 307 | GGGCUCCAAUGCACGUUUGCA | 851 |
| D-1551 | | | | | |
| D-1305 | 3781 | AACGUGCAUUGGAGCCCUAUU | 308 | AAUAGGGCUCCAAUGCACGUU | 852 |
| D-1306 | 3782 | ACGUGCAUUGGAGCCCUAUUU | 309 | AAAUAGGGCUCCAAUGCACGU | 853 |
| D-1307 | 3784 | GUGCAUUGGAGCCCUAUUUGC | 310 | GCAAAUAGGGCUCCAAUGCAC | 854 |
| D-1308 | 3785 | UGCAUUGGAGCCCUAUUUGCU | 311 | AGCAAAUAGGGCUCCAAUGCA | 855 |
| D-1309 | 3790 | UGGAGCCCUAUUUGCUGCCGC | 312 | GCGGCAGCAAAUAGGGCUCCA | 856 |
| D-1310 | 3791 | GGAGCCCUAUUUGCUGCCGCU | 313 | AGCGGCAGCAAAUAGGGCUCC | 857 |
| D-1311 | 3792 | GAGCCCUAUUUGCUGCCGCUG | 314 | CAGCGGCAGCAAAUAGGGCUC | 858 |
| D-1312 | 3793 | AGCCCUAUUUGCUGCCGCUGC | 315 | GCAGCGGCAGCAAAUAGGGCU | 859 |
| D-1313 | 3807 | CCGCUGCCAUUCUAGUGACCU | 316 | AGGUCACUAGAAUGGCAGCGG | 860 |
| D-1314 | 3811 | UGCCAUUCUAGUGACCUUUCC | 317 | GGAAAGGUCACUAGAAUGGCA | 861 |
| D-1315 | 3812 | GCCAUUCUAGUGACCUUUCCA | 318 | UGGAAAGGUCACUAGAAUGGC | 862 |
| D-1316 | 3818 | CUAGUGACCUUUCCACAGAGC | 319 | GCUCUGUGGAAAGGUCACUAG | 863 |
| D-1317 | 3834 | AGAGCUGCGCCUUCCUCACGU | 320 | ACGUGAGGAAGGCGCAGCUCU | 864 |
| D-1318 | 3840 | GCGCCUUCCUCACGUGUGUGA | 321 | UCACACACGUGAGGAAGGCGC | 865 |
| D-1319 | 3847 | CCUCACGUGUGUGAAAGGUUU | 322 | AAACCUUUCACACACGUGAGG | 866 |
| D-1320 | 3848 | CUCACGUGUGUGAAAGGUUUU | 323 | AAAACCUUUCACACACGUGAG | 867 |
| D-1321 | 3873 | UUCAGCCCUCAGGUAGAUGGA | 324 | UCCAUCUACCUGAGGGCUGAA | 868 |
| D-1322 | 3874 | UCAGCCCUCAGGUAGAUGGAA | 325 | UUCCAUCUACCUGAGGGCUGA | 869 |
| D-1323 | 3876 | AGCCCUCAGGUAGAUGGAAGC | 326 | GCUUCCAUCUACCUGAGGGCU | 870 |
| D- | 3907 | CACGAUGGCAGUGCAGUCAUC | 327 | GAUGACUGCACUGCCAUCGUG | 871 |
| 1323B | | | | | |
| D-1324 | 3932 | UCAGGAUGUUUCUUCAGGACU | 328 | AGUCCUGAAGAAACAUCCUGA | 872 |
| D-1325 | 3952 | UUCCUCAGCUGACAAGGAAUU | 329 | AAUUCCUUGUCAGCUGAGGAA | 873 |
| D-1326 | 3958 | AGCUGACAAGGAAUUUUGGUC | 330 | GACCAAAAUUCCUUGUCAGCU | 874 |
| D-1327 | 3968 | GAAUUUUGGUCCCUGCCUAGG | 331 | CCUAGGCAGGGACCAAAAUUC | 875 |
| D-1328 | 3969 | AAUUUUGGUCCCUGCCUAGGA | 332 | UCCUAGGCAGGGACCAAAAUU | 876 |
| D-1328 | 3971 | UUUUGGUCCCUGCCUAGGACC | 333 | GGUCCUAGGCAGGGACCAAAA | 877 |
| D-1329 | 3972 | UUUGGUCCCUGCCUAGGACCG | 334 | CGGUCCUAGGCAGGGACCAAA | 878 |
| D-1330 | 3980 | CUGCCUAGGACCGGGUCAUCU | 335 | AGAUGACCCGGUCCUAGGCAG | 879 |
| D-1331 | 4008 | ACAGAGAGAUGGUAAGCAGCU | 336 | AGCUGCUUACCAUCUCUCUGU | 880 |
| D-1548 | | | | | |
| D-1332 | 4011 | GAGAGAUGGUAAGCAGCUGUA | 337 | UACAGCUGCUUACCAUCUCUC | 881 |
| D-1333 | 4012 | AGAGAUGGUAAGCAGCUGUAU | 338 | AUACAGCUGCUUACCAUCUCU | 882 |
| D-1334 | 4013 | GAGAUGGUAAGCAGCUGUAUG | 339 | CAUACAGCUGCUUACCAUCUC | 883 |
| D-1335 | 4019 | GUAAGCAGCUGUAUGAAUGCU | 340 | AGCAUUCAUACAGCUGCUUAC | 884 |
| D-1336 | 4022 | AGCAGCUGUAUGAAUGCUGAU | 341 | AUCAGCAUUCAUACAGCUGCU | 885 |
| D-1337 | 4040 | GAUUUUAAAACCAGGUCAUGG | 342 | CCAUGACCUGGUUUUAAAAUC | 886 |
| D-1338 | 4042 | UUUUAAAACCAGGUCAUGGGA | 343 | UCCCAUGACCUGGUUUUAAAA | 887 |
| D-1339 | 4084 | CUGAACACUGACUGCACUUAC | 344 | GUAAGUGCAGUCAGUGUUCAG | 888 |
| D-1340 | 4085 | UGAACACUGACUGCACUUACC | 345 | GGUAAGUGCAGUCAGUGUUCA | 889 |
| D-1341 | 4098 | CACUUACCAGUCUGAUUUUAU | 346 | AUAAAAUCAGACUGGUAAGUG | 890 |
| D-1342 | 4103 | ACCAGUCUGAUUUUAUCGUCA | 347 | UGACGAUAAAAUCAGACUGGU | 891 |
| D-1343 | 4104 | CCAGUCUGAUUUUAUCGUCAA | 348 | UUGACGAUAAAAUCAGACUGG | 892 |
| D-1344 | 4108 | UCUGAUUUUAUCGUCAAACAC | 349 | GUGUUUGACGAUAAAAUCAGA | 893 |
| D-1345 | 4109 | CUGAUUUUAUCGUCAAACACC | 350 | GGUGUUUGACGAUAAAAUCAG | 894 |
| D-1600 | | | | | |
| D-1346 | 4110 | UGAUUUUAUCGUCAAACACCA | 351 | UGGUGUUUGACGAUAAAAUCA | 895 |
| D-1347 | 4111 | GAUUUUAUCGUCAAACACCAA | 352 | UUGGUGUUUGACGAUAAAAUC | 896 |
| D-1348 | 4112 | AUUUUAUCGUCAAACACCAAG | 353 | CUUGGUGUUUGACGAUAAAAU | 897 |
| D-1349 | 4115 | UUAUCGUCAAACACCAAGCCA | 354 | UGGCUUGGUGUUUGACGAUAA | 898 |
| D-1350 | 4116 | UAUCGUCAAACACCAAGCCAG | 355 | CUGGCUUGGUGUUUGACGAUA | 899 |
| D-1351 | 4142 | CAUGCUCAUGGCAAUCUGUUU | 356 | AAACAGAUUGCCAUGAGCAUG | 900 |
| D-1352 | 4147 | UCAUGGCAAUCUGUUUGGGGC | 357 | GCCCCAAACAGAUUGCCAUGA | 901 |
| D-1353 | 4169 | GUUUUGUUGUGGCACUAGCCA | 358 | UGGCUAGUGCCACAACAAAAC | 902 |
| D-1354 | 4170 | UUUUGUUGUGGCACUAGCCAA | 359 | UUGGCUAGUGCCACAACAAAA | 903 |
| D-1355 | 4171 | UUUGUUGUGGCACUAGCCAAA | 360 | UUUGGCUAGUGCCACAACAAA | 904 |
| D-1356 | 4172 | UUGUUGUGGCACUAGCCAAAC | 361 | GUUUGGCUAGUGCCACAACAA | 905 |
| D-1357 | 4174 | GUUGUGGCACUAGCCAAACAU | 362 | AUGUUUGGCUAGUGCCACAAC | 906 |
| D-1358 | 4175 | UUGUGGCACUAGCCAAACAUA | 363 | UAUGUUUGGCUAGUGCCACAA | 907 |
| D-1359 | 4176 | UGUGGCACUAGCCAAACAUAA | 364 | UUAUGUUUGGCUAGUGCCACA | 908 |
| D-1360 | 4177 | GUGGCACUAGCCAAACAUAAA | 365 | UUUAUGUUUGGCUAGUGCCAC | 909 |
| D-1361 | 4178 | UGGCACUAGCCAAACAUAAAG | 366 | CUUUAUGUUUGGCUAGUGCCA | 910 |
| D-1362 | 4179 | GGCACUAGCCAAACAUAAAGG | 367 | CCUUUAUGUUUGGCUAGUGCC | 911 |
| D-1363 | 4180 | GCACUAGCCAAACAUAAAGGG | 368 | CCCUUUAUGUUUGGCUAGUGC | 912 |
| D-1364 | 4185 | AGCCAAACAUAAAGGGGCUUA | 369 | UAAGCCCCUUUAUGUUUGGCU | 913 |
| D-1365 | 4186 | GCCAAACAUAAAGGGGCUUAA | 370 | UUAAGCCCCUUUAUGUUUGGC | 914 |
| D-1366 | 4187 | CCAAACAUAAAGGGGCUUAAG | 371 | CUUAAGCCCCUUUAUGUUUGG | 915 |
| D-1367 | 4188 | CAAACAUAAAGGGGCUUAAGU | 372 | ACUUAAGCCCCUUUAUGUUUG | 916 |
| D-1368 | 4189 | AAACAUAAAGGGGCUUAAGUC | 373 | GACUUAAGCCCCUUUAUGUUU | 917 |
| D-1369 | 4190 | AACAUAAAGGGGCUUAAGUCA | 374 | UGACUUAAGCCCCUUUAUGUU | 918 |
| D-1370 | 4191 | ACAUAAAGGGGCUUAAGUCAG | 375 | CUGACUUAAGCCCCUUUAUGU | 919 |
| D-1371 | 4193 | AUAAAGGGGCUUAAGUCAGCC | 376 | GGCUGACUUAAGCCCCUUUAU | 920 |
| D-1372 | 4194 | UAAAGGGGCUUAAGUCAGCCU | 377 | AGGCUGACUUAAGCCCCUUUA | 921 |
| D-1373 | 4197 | AGGGGCUUAAGUCAGCCUGCA | 378 | UGCAGGCUGACUUAAGCCCCU | 922 |
| D-1374 | 4205 | AAGUCAGCCUGCAUACAGAGG | 379 | CCUCUGUAUGCAGGCUGACUU | 923 |
| D-1375 | 4206 | AGUCAGCCUGCAUACAGAGGA | 380 | UCCUCUGUAUGCAGGCUGACU | 924 |
| D-1376 | 4210 | AGCCUGCAUACAGAGGAUCGG | 381 | CCGAUCCUCUGUAUGCAGGCU | 925 |
| D-1377 | 4211 | GCCUGCAUACAGAGGAUCGGG | 382 | CCCGAUCCUCUGUAUGCAGGC | 926 |
| D-1378 | 4212 | CCUGCAUACAGAGGAUCGGGG | 383 | CCCCGAUCCUCUGUAUGCAGG | 927 |
| D-1379 | 4219 | ACAGAGGAUCGGGGAGAGAAG | 384 | CUUCUCUCCCCGAUCCUCUGU | 928 |
| D-1380 | 4262 | GAGUACUUACCAGAGUUUAAU | 385 | AUUAAACUCUGGUAAGUACUC | 929 |
| D-2100 | 4297 | UCUGCACUAAAAUCCCCAAAC | 2819 | GUUUGGGGAUUUUAGUGCAGA | 2820 |
| D-1381 | 4298 | CUGCACUAAAAUCCCCAAACU | 386 | AGUUUGGGGAUUUUAGUGCAG | 930 |
| D-1382 | 4299 | UGCACUAAAAUCCCCAAACUG | 387 | CAGUUUGGGGAUUUUAGUGCA | 931 |
| D-1383 | 4301 | CACUAAAAUCCCCAAACUGAC | 388 | GUCAGUUUGGGGAUUUUAGUG | 932 |
| D-1384 | 4307 | AAUCCCCAAACUGACAGGUAA | 389 | UUACCUGUCAGUUUGGGGAUU | 933 |
| D-1385 | 4312 | CCAAACUGACAGGUAAAUGUA | 390 | UACAUUUACCUGUCAGUUUGG | 934 |
| D-1386 | 4313 | CAAACUGACAGGUAAAUGUAG | 391 | CUACAUUUACCUGUCAGUUUG | 935 |
| D-1387 | 4314 | AAACUGACAGGUAAAUGUAGC | 392 | GCUACAUUUACCUGUCAGUUU | 936 |
| D-1388 | 4316 | ACUGACAGGUAAAUGUAGCCC | 393 | GGGCUACAUUUACCUGUCAGU | 937 |
| D-1389 | 4359 | AUCUAAAUCACACUAUUUUCG | 394 | CGAAAAUAGUGUGAUUUAGAU | 938 |
| D-1390 | 4361 | CUAAAUCACACUAUUUUCGAG | 395 | CUCGAAAAUAGUGUGAUUUAG | 939 |
| D-1391 | 4362 | UAAAUCACACUAUUUUCGAGA | 396 | UCUCGAAAAUAGUGUGAUUUA | 940 |
| D-1392 | 4364 | AAUCACACUAUUUUCGAGAUC | 397 | GAUCUCGAAAAUAGUGUGAUU | 941 |
| D-1393 | 4366 | UCACACUAUUUUCGAGAUCAU | 398 | AUGAUCUCGAAAAUAGUGUGA | 942 |
| D-1394 | 4367 | CACACUAUUUUCGAGAUCAUG | 399 | CAUGAUCUCGAAAAUAGUGUG | 943 |
| D-1395 | 4368 | ACACUAUUUUCGAGAUCAUGU | 400 | ACAUGAUCUCGAAAAUAGUGU | 944 |
| D-1396 | 4370 | ACUAUUUUCGAGAUCAUGUAU | 401 | AUACAUGAUCUCGAAAAUAGU | 945 |
| D-1397 | 4371 | CUAUUUUCGAGAUCAUGUAUA | 402 | UAUACAUGAUCUCGAAAAUAG | 946 |
| D-1398 | 4373 | AUUUUCGAGAUCAUGUAUAAA | 403 | UUUAUACAUGAUCUCGAAAAU | 947 |
| D-1399 | 4376 | UUCGAGAUCAUGUAUAAAAAG | 404 | CUUUUUAUACAUGAUCUCGAA | 948 |
| D-1400 | 4399 | AAAAAAGAAGUCAUGCUGUGU | 405 | ACACAGCAUGACUUCUUUUUU | 949 |
| D-1401 | 4412 | UGCUGUGUGGCCAAUUAUAAU | 406 | AUUAUAAUUGGCCACACAGCA | 950 |
| D-1777 | | | | | |
| D-1937 | | | | | |
| D-1943 | | | | | |
| D-1949 | | | | | |
| D-1955 | | | | | |
| D-1961 | | | | | |
| D-1967 | | | | | |
| D-1973 | | | | | |
| D-2041 | | | | | |
| D-2045 | | | | | |
| D-2050 | | | | | |
| D-2057 | | | | | |
| D-2058 | | | | | |
| D-2059 | | | | | |
| D-2060 | | | | | |
| D-2061 | | | | | |
| D-2085 | | | | | |
| D-2091 | | | | | |
| D-1402 | 4476 | UUGGAGGGACCAGGAAAUGUA | 407 | UACAUUUCCUGGUCCCUCCAA | 951 |
| D-1403 | 4484 | ACCAGGAAAUGUAAGACACCA | 408 | UGGUGUCUUACAUUUCCUGGU | 952 |
| D-1742 | | | | | |
| D-1404 | 4485 | CCAGGAAAUGUAAGACACCAA | 409 | UUGGUGUCUUACAUUUCCUGG | 953 |
| D-1743 | | | | | |
| D-1405 | 4522 | GUGUGCCUGAUGUCACCUCAU | 410 | AUGAGGUGACAUCAGGCACAC | 954 |
| D-1406 | 4523 | UGUGCCUGAUGUCACCUCAUG | 411 | CAUGAGGUGACAUCAGGCACA | 955 |
| D-1407 | 4524 | GUGCCUGAUGUCACCUCAUGA | 412 | UCAUGAGGUGACAUCAGGCAC | 956 |
| D-1408 | 4526 | GCCUGAUGUCACCUCAUGAUU | 413 | AAUCAUGAGGUGACAUCAGGC | 957 |
| D-1409 | 4556 | UUUUUUAACUCCUGCGCCAAG | 414 | CUUGGCGCAGGAGUUAAAAAA | 958 |
| D-1410 | 4560 | UUAACUCCUGCGCCAAGGACA | 415 | UGUCCUUGGCGCAGGAGUUAA | 959 |
| D-1411 | 4562 | AACUCCUGCGCCAAGGACAGU | 416 | ACUGUCCUUGGCGCAGGAGUU | 960 |
| D-1412 | 4563 | ACUCCUGCGCCAAGGACAGUG | 417 | CACUGUCCUUGGCGCAGGAGU | 961 |
| D-1413 | 4591 | UGUCCACCUUUGUGCUUUGCG | 418 | CGCAAAGCACAAAGGUGGACA | 962 |
| D-1414 | 4593 | UCCACCUUUGUGCUUUGCGAG | 419 | CUCGCAAAGCACAAAGGUGGA | 963 |
| D-1415 | 4595 | CACCUUUGUGCUUUGCGAGGC | 420 | GCCUCGCAAAGCACAAAGGUG | 964 |
| D-1416 | 4597 | CCUUUGUGCUUUGCGAGGCCG | 421 | CGGCCUCGCAAAGCACAAAGG | 965 |
| D-1417 | 4617 | GAGCCCAGGCAUCUGCUCGCC | 422 | GGCGAGCAGAUGCCUGGGCUC | 966 |
| D-1418 | 4620 | CCCAGGCAUCUGCUCGCCUGC | 423 | GCAGGCGAGCAGAUGCCUGGG | 967 |
| D-1419 | 4622 | CAGGCAUCUGCUCGCCUGCCA | 424 | UGGCAGGCGAGCAGAUGCCUG | 968 |
| D-1420 | 4625 | GCAUCUGCUCGCCUGCCACGG | 425 | CCGUGGCAGGCGAGCAGAUGC | 969 |
| D-1421 | 4638 | UGCCACGGCUGACCAGAGAAG | 426 | CUUCUCUGGUCAGCCGUGGCA | 970 |
| D-1422 | 4668 | GAGCUCUGCCUUAGACGACGU | 427 | ACGUCGUCUAAGGCAGAGCUC | 971 |
| D-1423 | 4669 | AGCUCUGCCUUAGACGACGUG | 428 | CACGUCGUCUAAGGCAGAGCU | 972 |
| D-1424 | 4670 | GCUCUGCCUUAGACGACGUGU | 429 | ACACGUCGUCUAAGGCAGAGC | 973 |
| D-1425 | 4671 | CUCUGCCUUAGACGACGUGUU | 430 | AACACGUCGUCUAAGGCAGAG | 974 |
| D-1426 | 4672 | UCUGCCUUAGACGACGUGUUA | 431 | UAACACGUCGUCUAAGGCAGA | 975 |
| D-1427 | 4673 | CUGCCUUAGACGACGUGUUAC | 432 | GUAACACGUCGUCUAAGGCAG | 976 |
| D-1428 | 4675 | GCCUUAGACGACGUGUUACAG | 433 | CUGUAACACGUCGUCUAAGGC | 977 |
| D-1429 | 4676 | CCUUAGACGACGUGUUACAGU | 434 | ACUGUAACACGUCGUCUAAGG | 978 |
| D-1430 | 4677 | CUUAGACGACGUGUUACAGUA | 435 | UACUGUAACACGUCGUCUAAG | 979 |
| D-1431 | 4679 | UAGACGACGUGUUACAGUAUG | 436 | CAUACUGUAACACGUCGUCUA | 980 |
| D-1432 | 4682 | ACGACGUGUUACAGUAUGAAC | 437 | GUUCAUACUGUAACACGUCGU | 981 |
| D-1433 | 4703 | ACACAGCAGAGGCACCCUCGU | 438 | ACGAGGGUGCCUCUGCUGUGU | 982 |
| D-1434 | 4704 | CACAGCAGAGGCACCCUCGUA | 439 | UACGAGGGUGCCUCUGCUGUG | 983 |
| D-1435 | 4705 | ACAGCAGAGGCACCCUCGUAU | 440 | AUACGAGGGUGCCUCUGCUGU | 984 |
| D-1436 | 4706 | CAGCAGAGGCACCCUCGUAUG | 441 | CAUACGAGGGUGCCUCUGCUG | 985 |
| D-1437 | 4707 | AGCAGAGGCACCCUCGUAUGU | 442 | ACAUACGAGGGUGCCUCUGCU | 986 |
| D-1438 | 4708 | GCAGAGGCACCCUCGUAUGUU | 443 | AACAUACGAGGGUGCCUCUGC | 987 |
| D-1439 | 4709 | CAGAGGCACCCUCGUAUGUUU | 444 | AAACAUACGAGGGUGCCUCUG | 988 |
| D-1440 | 4710 | AGAGGCACCCUCGUAUGUUUU | 445 | AAAACAUACGAGGGUGCCUCU | 989 |
| D-1441 | 4711 | GAGGCACCCUCGUAUGUUUUG | 446 | CAAAACAUACGAGGGUGCCUC | 990 |
| D-1442 | 4713 | GGCACCCUCGUAUGUUUUGAA | 447 | UUCAAAACAUACGAGGGUGCC | 991 |
| D-1443 | 4717 | CCCUCGUAUGUUUUGAAAGUU | 448 | AACUUUCAAAACAUACGAGGG | 992 |
| D-1744 | | | | | |
| D-1896 | | | | | |
| D-1902 | | | | | |
| D-1908 | | | | | |
| D-1914 | | | | | |
| D-1920 | | | | | |
| D-1926 | | | | | |
| D-1932 | | | | | |
| D-2062 | | | | | |
| D-2063 | | | | | |
| D-2089 | | | | | |
| D-1444 | 4777 | AUGUAAAACUAUACUGACCCG | 449 | CGGGUCAGUAUAGUUUUACAU | 993 |
| D-1778 | | | | | |
| D-1445 | 4778 | UGUAAAACUAUACUGACCCGU | 450 | ACGGGUCAGUAUAGUUUUACA | 994 |
| D-1446 | 4779 | GUAAAACUAUACUGACCCGUU | 451 | AACGGGUCAGUAUAGUUUUAC | 995 |
| D-1590 | | | | | |
| D-1447 | 4780 | UAAAACUAUACUGACCCGUUU | 452 | AAACGGGUCAGUAUAGUUUUA | 996 |
| D-1779 | | | | | |
| D-1448 | 4784 | ACUAUACUGACCCGUUUUCAG | 453 | CUGAAAACGGGUCAGUAUAGU | 997 |
| D-1449 | 4787 | AUACUGACCCGUUUUCAGUUU | 454 | AAACUGAAAACGGGUCAGUAU | 998 |
| D-1450 | 4799 | UUUCAGUUUUAAAGGGUCGUG | 455 | CACGACCCUUUAAAACUGAAA | 999 |
| D-1745 | | | | | |
| D-1451 | 4800 | UUCAGUUUUAAAGGGUCGUGA | 456 | UCACGACCCUUUAAAACUGAA | 1000 |
| D-1452 | 4801 | UCAGUUUUAAAGGGUCGUGAG | 457 | CUCACGACCCUUUAAAACUGA | 1001 |
| D-1746 | | | | | |
| D-1453 | 4802 | CAGUUUUAAAGGGUCGUGAGA | 458 | UCUCACGACCCUUUAAAACUG | 1002 |
| D-1747 | | | | | |
| D-1454 | 4804 | GUUUUAAAGGGUCGUGAGAAA | 459 | UUUCUCACGACCCUUUAAAAC | 1003 |
| D-1630 | | | | | |
| D-1454 | 4805 | UUUUAAAGGGUCGUGAGAAAC | 460 | GUUUCUCACGACCCUUUAAAA | 1004 |
| D-1455 | 4806 | UUUAAAGGGUCGUGAGAAACU | 461 | AGUUUCUCACGACCCUUUAAA | 1005 |
| D-1748 | | | | | |
| D-1456 | 4808 | UAAAGGGUCGUGAGAAACUGG | 462 | CCAGUUUCUCACGACCCUUUA | 1006 |
| D-1457 | 4809 | AAAGGGUCGUGAGAAACUGGC | 463 | GCCAGUUUCUCACGACCCUUU | 1007 |
| D-1458 | 4819 | GAGAAACUGGCUGGUCCAAUG | 464 | CAUUGGACCAGCCAGUUUCUC | 1008 |
| D-1780 | | | | | |
| D-1459 | 4830 | UGGUCCAAUGGGAUUUACAGC | 465 | GCUGUAAAUCCCAUUGGACCA | 1009 |
| D-1460 | 4834 | CCAAUGGGAUUUACAGCAACA | 466 | UGUUGCUGUAAAUCCCAUUGG | 1010 |
| D-1781 | | | | | |
| D-1894 | | | | | |
| D-1900 | | | | | |
| D-1906 | | | | | |
| D-1912 | | | | | |
| D-1918 | | | | | |
| D-1924 | | | | | |
| D-1930 | | | | | |
| D-2064 | | | | | |
| D-2065 | | | | | |
| D-2066 | | | | | |
| D-2067 | | | | | |
| D-2068 | | | | | |
| D-2092 | | | | | |
| D-1461 | 4927 | UUUAAGUUUGCUCUUAAUCGU | 467 | ACGAUUAAGAGCAAACUUAAA | 1011 |
| D-1596 | | | | | |
| D-1462 | 4928 | UUAAGUUUGCUCUUAAUCGUA | 468 | UACGAUUAAGAGCAAACUUAA | 1012 |
| D-1594 | | | | | |
| D-1463 | 4931 | AGUUUGCUCUUAAUCGUAUGG | 469 | CCAUACGAUUAAGAGCAAACU | 1013 |
| D-1782 | | | | | |
| D-1464 | 4932 | GUUUGCUCUUAAUCGUAUGGA | 470 | UCCAUACGAUUAAGAGCAAAC | 1014 |
| D-1783 | | | | | |
| D-1895 | | | | | |
| D-1901 | | | | | |
| D-1907 | | | | | |
| D-1913 | | | | | |
| D-1919 | | | | | |
| D-1925 | | | | | |
| D-1931 | | | | | |
| D-2069 | | | | | |
| D-2070 | | | | | |
| D-2071 | | | | | |
| D-2072 | | | | | |
| D-2073 | | | | | |
| D-2074 | | | | | |
| D-2088 | | | | | |
| D-1465 | 4933 | UUUGCUCUUAAUCGUAUGGAA | 471 | UUCCAUACGAUUAAGAGCAAA | 1015 |
| D-1784 | | | | | |
| D-1466 | 4935 | UGCUCUUAAUCGUAUGGAAGC | 472 | GCUUCCAUACGAUUAAGAGCA | 1016 |
| D-1785 | | | | | |
| D-1467 | 4939 | CUUAAUCGUAUGGAAGCUUGA | 473 | UCAAGCUUCCAUACGAUUAAG | 1017 |
| D-1786 | | | | | |
| D-1468 | 4940 | UUAAUCGUAUGGAAGCUUGAG | 474 | CUCAAGCUUCCAUACGAUUAA | 1018 |
| D-1787 | | | | | |
| D-1469 | 4950 | GGAAGCUUGAGCUAUGUGUUG | 475 | CAACACAUAGCUCAAGCUUCC | 1019 |
| D-1749 | | | | | |
| D-1470 | 4951 | GAAGCUUGAGCUAUGUGUUGG | 476 | CCAACACAUAGCUCAAGCUUC | 1020 |
| D-1750 | | | | | |
| D-1471 | 4953 | AGCUUGAGCUAUGUGUUGGAA | 477 | UUCCAACACAUAGCUCAAGCU | 1021 |
| D-1751 | | | | | |
| D-1472 | 4954 | GCUUGAGCUAUGUGUUGGAAG | 478 | CUUCCAACACAUAGCUCAAGC | 1022 |
| D-1752 | | | | | |
| D-1473 | 4955 | CUUGAGCUAUGUGUUGGAAGU | 479 | ACUUCCAACACAUAGCUCAAG | 1023 |
| D-1753 | | | | | |
| D-1474 | 4956 | UUGAGCUAUGUGUUGGAAGUG | 480 | CACUUCCAACACAUAGCUCAA | 1024 |
| D-1593 | | | | | |
| D-1475 | 4957 | UGAGCUAUGUGUUGGAAGUGC | 481 | GCACUUCCAACACAUAGCUCA | 1025 |
| D-1631 | | | | | |
| D-1696 | | | | | |
| D-1703 | | | | | |
| D-1710 | | | | | |
| D-1717 | | | | | |
| D-1724 | | | | | |
| D-1731 | | | | | |
| D-1738 | | | | | |
| D-1857 | | | | | |
| D-2011 | | | | | |
| D-2020 | | | | | |
| D-1476 | 4958 | GAGCUAUGUGUUGGAAGUGCC | 482 | GGCACUUCCAACACAUAGCUC | 1026 |
| D-1754 | | | | | |
| D-1477 | 4965 | GUGUUGGAAGUGCCCUGGUUU | 483 | AAACCAGGGCACUUCCAACAC | 1027 |
| D-1755 | | | | | |
| D-1478 | 4970 | GGAAGUGCCCUGGUUUUAAUC | 484 | GAUUAAAACCAGGGCACUUCC | 1028 |
| D-1756 | | | | | |
| D-1479 | 4979 | CUGGUUUUAAUCCAUACACAA | 485 | UUGUGUAUGGAUUAAAACCAG | 1029 |
| D-1480 | 4985 | UUAAUCCAUACACAAAGACGG | 486 | CCGUCUUUGUGUAUGGAUUAA | 1030 |
| D-1481 | 4986 | UAAUCCAUACACAAAGACGGU | 487 | ACCGUCUUUGUGUAUGGAUUA | 1031 |
| D-1482 | 4987 | AAUCCAUACACAAAGACGGUA | 488 | UACCGUCUUUGUGUAUGGAUU | 1032 |
| D-1483 | 4988 | AUCCAUACACAAAGACGGUAC | 489 | GUACCGUCUUUGUGUAUGGAU | 1033 |
| D-1484 | 4989 | UCCAUACACAAAGACGGUACA | 490 | UGUACCGUCUUUGUGUAUGGA | 1034 |
| D-1788 | | | | | |
| D-1485 | 4991 | CAUACACAAAGACGGUACAUA | 491 | UAUGUACCGUCUUUGUGUAUG | 1035 |
| D-1789 | | | | | |
| D-1486 | 4993 | UACACAAAGACGGUACAUAAU | 492 | AUUAUGUACCGUCUUUGUGUA | 1036 |
| D-1634 | | | | | |
| D-1487 | 4994 | ACACAAAGACGGUACAUAAUC | 493 | GAUUAUGUACCGUCUUUGUGU | 1037 |
| D-1488 | 4995 | CACAAAGACGGUACAUAAUCC | 494 | GGAUUAUGUACCGUCUUUGUG | 1038 |
| D-1546 | | | | | |
| D-2036 | | | | | |
| D-1489 | 4996 | ACAAAGACGGUACAUAAUCCU | 495 | AGGAUUAUGUACCGUCUUUGU | 1039 |
| D-1757 | | | | | |
| D-2037 | | | | | |
| D-1490 | 4997 | CAAAGACGGUACAUAAUCCUA | 496 | UAGGAUUAUGUACCGUCUUUG | 1040 |
| D-1758 | | | | | |
| D-2038 | | | | | |
| D-1491 | 4998 | AAAGACGGUACAUAAUCCUAC | 497 | GUAGGAUUAUGUACCGUCUUU | 1041 |
| D-1562 | | | | | |
| D-2039 | | | | | |
| D-1492 | 4999 | AAGACGGUACAUAAUCCUACA | 498 | UGUAGGAUUAUGUACCGUCUU | 1042 |
| D-1614 | | | | | |
| D-1697 | | | | | |
| D-1702 | | | | | |
| D-1709 | | | | | |
| D-1716 | | | | | |
| D-1723 | | | | | |
| D-1730 | | | | | |
| D-1737 | | | | | |
| D-1856 | | | | | |
| D-1863 | | | | | |
| D-1865 | | | | | |
| D-1866 | | | | | |
| D-1869 | | | | | |
| D-1872 | | | | | |
| D-1877 | | | | | |
| D-1878 | | | | | |
| D-1879 | | | | | |
| D-1880 | | | | | |
| D-1881 | | | | | |
| D-1884 | | | | | |
| D-1887 | | | | | |
| D-1978 | | | | | |
| D-1987 | | | | | |
| D-1992 | | | | | |
| D-1997 | | | | | |
| D-2002 | | | | | |
| D-2008 | | | | | |
| D-2017 | | | | | |
| D-2049 | | | | | |
| D-2054 | | | | | |
| D-2090 | | | | | |
| D-1493 | 5005 | GUACAUAAUCCUACAGGUUUA | 499 | UAAACCUGUAGGAUUAUGUAC | 1043 |
| D-1566 | | | | | |
| D-1494 | 5008 | CAUAAUCCUACAGGUUUAAAU | 500 | AUUUAAACCUGUAGGAUUAUG | 1044 |
| D-1759 | | | | | |
| D-1495 | 5012 | AUCCUACAGGUUUAAAUGUAC | 501 | GUACAUUUAAACCUGUAGGAU | 1045 |
| D-1633 | | | | | |
| D-1496 | 5042 | UAGUUUGGAAUUCUUUGCUCU | 502 | AGAGCAAAGAAUUCCAAACUA | 1046 |
| D-1564 | | | | | |
| D-2040 | | | | | |
| D-1497 | 5043 | AGUUUGGAAUUCUUUGCUCUA | 503 | UAGAGCAAAGAAUUCCAAACU | 1047 |
| D-1611 | | | | | |
| D-1698 | | | | | |
| D-1705 | | | | | |
| D-1712 | | | | | |
| D-1719 | | | | | |
| D-1726 | | | | | |
| D-1733 | | | | | |
| D-1740 | | | | | |
| D-1855 | | | | | |
| D-1864 | | | | | |
| D-1870 | | | | | |
| D-1875 | | | | | |
| D-1883 | | | | | |
| D-1886 | | | | | |
| D-1980 | | | | | |
| D-1984 | | | | | |
| D-1989 | | | | | |
| D-1994 | | | | | |
| D-1999 | | | | | |
| D-2004 | | | | | |
| D-2013 | | | | | |
| D-2022 | | | | | |
| D-2044 | | | | | |
| D-2048 | | | | | |
| D-2053 | | | | | |
| D-1498 | 5045 | UUUGGAAUUCUUUGCUCUACU | 504 | AGUAGAGCAAAGAAUUCCAAA | 1048 |
| D-1612 | | | | | |
| D-1699 | | | | | |
| D-1704 | | | | | |
| D-1711 | | | | | |
| D-1718 | | | | | |
| D-1725 | | | | | |
| D-1732 | | | | | |
| D-1739 | | | | | |
| D-1854 | | | | | |
| D-1868 | | | | | |
| D-1871 | | | | | |
| D-1876 | | | | | |
| D-1882 | | | | | |
| D-1885 | | | | | |
| D-1888 | | | | | |
| D-1979 | | | | | |
| D-1983 | | | | | |
| D-1988 | | | | | |
| D-1993 | | | | | |
| D-1998 | | | | | |
| D-2003 | | | | | |
| D-2012 | | | | | |
| D-2021 | | | | | |
| D-2043 | | | | | |
| D-2047 | | | | | |
| D-2052 | | | | | |
| D-1499 | 5056 | UUGCUCUACUGUUUACAUUGC | 505 | GCAAUGUAAACAGUAGAGCAA | 1049 |
| D-1760 | | | | | |
| D-1500 | 5060 | UCUACUGUUUACAUUGCAGAU | 506 | AUCUGCAAUGUAAACAGUAGA | 1050 |
| D-1591 | | | | | |
| D-1624 | | | | | |
| D-1501 | 5062 | UACUGUUUACAUUGCAGAUUG | 507 | CAAUCUGCAAUGUAAACAGUA | 1051 |
| D-1577 | | | | | |
| D-1502 | 5063 | ACUGUUUACAUUGCAGAUUGC | 508 | GCAAUCUGCAAUGUAAACAGU | 1052 |
| D-1503 | 5067 | UUUACAUUGCAGAUUGCUAUA | 509 | UAUAGCAAUCUGCAAUGUAAA | 1053 |
| D-1603 | | | | | |
| D-1504 | 5068 | UUACAUUGCAGAUUGCUAUAA | 510 | UUAUAGCAAUCUGCAAUGUAA | 1054 |
| D-1629 | | | | | |
| D-1505 | 5069 | UACAUUGCAGAUUGCUAUAAU | 511 | AUUAUAGCAAUCUGCAAUGUA | 1055 |
| D-1628 | | | | | |
| D-1506 | 5079 | AUUGCUAUAAUUUCAAGGAGU | 512 | ACUCCUUGAAAUUAUAGCAAU | 1056 |
| D-1507 | 5080 | UUGCUAUAAUUUCAAGGAGUG | 513 | CACUCCUUGAAAUUAUAGCAA | 1057 |
| D-1623 | | | | | |
| D-1846 | | | | | |
| D-1706 | | | | | |
| D-1713 | | | | | |
| D-1720 | | | | | |
| D-1727 | | | | | |
| D-1734 | | | | | |
| D-1741 | | | | | |
| D-1761 | | | | | |
| D-1846 | | | | | |
| D-1862 | | | | | |
| D-1874 | | | | | |
| D-1981 | | | | | |
| D-1985 | | | | | |
| D-1990 | | | | | |
| D-1995 | | | | | |
| D-2000 | | | | | |
| D-2005 | | | | | |
| D-2014 | | | | | |
| D-2023 | | | | | |
| D-1508 | 5114 | AAUGAUGCACUUUAGGAUGUU | 514 | AACAUCCUAAAGUGCAUCAUU | 1058 |
| D-1762 | | | | | |
| D-1509 | 5115 | AUGAUGCACUUUAGGAUGUUU | 515 | AAACAUCCUAAAGUGCAUCAU | 1059 |
| D-1627 | | | | | |
| D-1763 | | | | | |
| D-1510 | 5154 | ACAUGAAUCAUUCACAUGACC | 516 | GGUCAUGUGAAUGAUUCAUGU | 1060 |
| D-1764 | | | | | |
| D-1511 | 5155 | CAUGAAUCAUUCACAUGACCA | 517 | UGGUCAUGUGAAUGAUUCAUG | 1061 |
| D-1765 | | | | | |
| D-1512 | 5194 | AAAUACAUGUCUAGUCUGUCC | 518 | GGACAGACUAGACAUGUAUUU | 1062 |
| D-1572 | | | | | |
| D- | 5195 | AAUACAUGUCUAGUCUGUCCU | 519 | AGGACAGACUAGACAUGUAUU | 1063 |
| 1512B | | | | | |
| D-1766 | | | | | |
| D-1513 | 5200 | AUGUCUAGUCUGUCCUUUAAU | 520 | AUUAAAGGACAGACUAGACAU | 1064 |
| D-1767 | | | | | |
| D-1514 | 5201 | UGUCUAGUCUGUCCUUUAAUA | 521 | UAUUAAAGGACAGACUAGACA | 1065 |
| D-1790 | | | | | |
| D-1515 | 5203 | UCUAGUCUGUCCUUUAAUAGC | 522 | GCUAUUAAAGGACAGACUAGA | 1066 |
| D-1791 | | | | | |
| D-1516 | 5204 | CUAGUCUGUCCUUUAAUAGCU | 523 | AGCUAUUAAAGGACAGACUAG | 1067 |
| D-1792 | | | | | |
| D-1892 | | | | | |
| D-1898 | | | | | |
| D-1904 | | | | | |
| D-1910 | | | | | |
| D-1916 | | | | | |
| D-1922 | | | | | |
| D-1928 | | | | | |
| D-1517 | 5205 | UAGUCUGUCCUUUAAUAGCUC | 524 | GAGCUAUUAAAGGACAGACUA | 1068 |
| D-1518 | 5207 | GUCUGUCCUUUAAUAGCUCUC | 525 | GAGAGCUAUUAAAGGACAGAC | 1069 |
| D-1793 | | | | | |
| D-1519 | 5247 | AAUCAGAUCAUUACCAGUUAG | 526 | CUAACUGGUAAUGAUCUGAUU | 1070 |
| D-1768 | | | | | |
| D-1891 | | | | | |
| D-1897 | | | | | |
| D-1903 | | | | | |
| D-1909 | | | | | |
| D-1915 | | | | | |
| D-1921 | | | | | |
| D-1927 | | | | | |
| D-2075 | | | | | |
| D-2077 | | | | | |
| D-1520 | 5249 | UCAGAUCAUUACCAGUUAGCU | 527 | AGCUAACUGGUAAUGAUCUGA | 1071 |
| D-1769 | | | | | |
| D-1934 | | | | | |
| D-1940 | | | | | |
| D-1946 | | | | | |
| D-1952 | | | | | |
| D-1958 | | | | | |
| D-1964 | | | | | |
| D-1970 | | | | | |
| D-2076 | | | | | |
| D-2078 | | | | | |
| D-1521 | 5250 | CAGAUCAUUACCAGUUAGCUU | 528 | AAGCUAACUGGUAAUGAUCUG | 1072 |
| D-1522 | 5251 | AGAUCAUUACCAGUUAGCUUU | 529 | AAAGCUAACUGGUAAUGAUCU | 1073 |
| D-1770 | | | | | |
| D-1523 | 5254 | UCAUUACCAGUUAGCUUUUAA | 530 | UUAAAAGCUAACUGGUAAUGA | 1074 |
| D-1771 | | | | | |
| D-1524 | 5255 | CAUUACCAGUUAGCUUUUAAA | 531 | UUUAAAAGCUAACUGGUAAUG | 1075 |
| D-1622 | | | | | |
| D-1525 | 5259 | ACCAGUUAGCUUUUAAAGCAC | 532 | GUGCUUUAAAAGCUAACUGGU | 1076 |
| D-1772 | | | | | |
| D-1526 | 5274 | AAGCACAUUUGUUUAAGACUA | 533 | UAGUCUUAAACAAAUGUGCUU | 1077 |
| D-1773 | | | | | |
| D-1936 | | | | | |
| D-1942 | | | | | |
| D-1948 | | | | | |
| D-1954 | | | | | |
| D-1960 | | | | | |
| D-1966 | | | | | |
| D-1972 | | | | | |
| D-2042 | | | | | |
| D-2046 | | | | | |
| D-2051 | | | | | |
| D-2079 | | | | | |
| D-2080 | | | | | |
| D-2081 | | | | | |
| D-2082 | | | | | |
| D-2083 | | | | | |
| D-2093 | | | | | |
| D-1527 | 5276 | GCACAUUUGUUUAAGACUAUG | 534 | CAUAGUCUUAAACAAAUGUGC | 1078 |
| D-1774 | | | | | |
| D-1893 | | | | | |
| D-1899 | | | | | |
| D-1905 | | | | | |
| D-1911 | | | | | |
| D-1917 | | | | | |
| D-1923 | | | | | |
| D-1929 | | | | | |
| D-1975 | | | | | |
| D-1976 | | | | | |
| D-1977 | | | | | |
| D-1982 | | | | | |
| D-1986 | | | | | |
| D-1991 | | | | | |
| D-1996 | | | | | |
| D-2001 | | | | | |
| D-2084 | | | | | |
| D-1528 | 5292 | CUAUGUUUUUGGAAAAAUACG | 535 | CGUAUUUUUCCAAAAACAUAG | 1079 |
| D-1529 | 5296 | GUUUUUGGAAAAAUACGCUAC | 536 | GUAGCGUAUUUUUCCAAAAAC | 1080 |
| D-1530 | 5300 | UUGGAAAAAUACGCUACAGAA | 537 | UUCUGUAGCGUAUUUUUCCAA | 1081 |
| D-1531 | 5338 | AAUAAAUGAGAUGCUACUAAU | 538 | AUUAGUAGCAUCUCAUUUAUU | 1082 |
| D-1625 | | | | | |
| D-1532 | 5344 | UGAGAUGCUACUAAUUGUUUU | 539 | AAAACAAUUAGUAGCAUCUCA | 1083 |
| D-1775 | | | | | |
| D-1533 | 5362 | UUUGGAAUCUGUUGUUUCUGC | 540 | GCAGAAACAACAGAUUCCAAA | 1084 |
| D-1534 | 5377 | UUCUGCCAAAGGUAAAUUAAC | 541 | GUUAAUUUACCUUUGGCAGAA | 1085 |
| D-1535 | 5378 | UCUGCCAAAGGUAAAUUAACU | 542 | AGUUAAUUUACCUUUGGCAGA | 1086 |
| D-1536 | 5402 | GAUUUAUUCAGGAAUCCCCAU | 543 | AUGGGGAUUCCUGAAUAAAUC | 1087 |
| D-1776 | | | | | |
| D-1537 | 5407 | AUUCAGGAAUCCCCAUUUGAA | 544 | UUCAAAUGGGGAUUCCUGAAU | 1088 |
| D-1538 | 5412 | GGAAUCCCCAUUUGAAUUUGU | 545 | ACAAAUUCAAAUGGGGAUUCC | 1089 |

[0193] Table 2 below provides the sequences of exemplary sense and antisense strands with chemical modifications od duplexes used in experiments disclosed herein. In Table 2, the nucleotide sequences are listed according to the following notations: a, u, g, and c=corresponding 2′-O-methyl ribonucleotide; Af, Uf, Gf, and Cf=corresponding 2′-deoxy-2′-fluoro (“2′-fluoro”) ribonucleotide; and invAb=inverted abasic deoxynucleotide (i.e., abasic deoxynucleotide linked to adjacent nucleotide via a substituent at its 3′ position (a 3′-3′ linkage) when on the 3′ end of a strand or linked to adjacent nucleotide via a substituent at its 5′ position (a 5′-5′ internucleotide linkage) when on the 5′ end of a strand. Insertion of an “s” in the sequence indicates that the two adjacent nucleotides are connected by a phosphorothiodiester group (e.g., a phosphorothioate internucleotide linkage). Unless indicated otherwise, all other nucleotides are connected by 3′-5′ phosphodiester groups. [DCA-C6] represents a conjugated docosanoic acid (C22). [GalNAc3] represents the GalNAc moiety shown in Formula VII. The [DCA-C6] and [GalNAc] ligands are covalently attached to the 5′ terminal nucleotide at the 5′ end of the sense strand via a phosphodiester bond, or a phosphorothioate bond when an “s” follows the [GalNAc3] or [DCA-C6] notation. When an invAb nucleotide was the 5′ terminal nucleotide at the 5′ end of the sense strand, it was linked to the adjacent nucleotide via a 5′-5′ linkage and the GalNAc or C22 moiety was covalently attached to the 3′ carbon of the invAb nucleotide. Otherwise, the moiety was covalently attached to the 5′ carbon of the 5′ terminal nucleotide of the sense strand.

TABLE 2
Modified FAM13A siRNA Sequences

| Duplex | | SEQ ID | | SEQ ID |
|---|---|---|---|---|
| No. | Sense Sequence (5′-3′) | NO: | Antisense Sequence (5′-3′) | NO: |
| D-1001 | csasuguaCfcCfCfAfAfgucagcaas | 1090 | asUfsugcuGfacuuggGfgUfacaugs | 1938 |
| | {invAb} | | usu | |
| D-1002 | usgsuaccCfcAfAfGfUfcagcaaugs | 1091 | asCfsauugCfugacuuGfgGfguacas | 1939 |
| | {invAb} | | usu | |
| D-1003 | gsusacccCfaAfGfUfCfagcaaugus | 1092 | asAfscauuGfcugacuUfgGfgguacs | 1940 |
| | {invAb} | | usu | |
| D-1004 | gscsaaugUfgUfCfUfGfcaaccggas | 1093 | asUfsccggUfugcagaCfaCfauugcs | 1941 |
| | {invAb} | | usu | |
| D-1005 | csasauguGfuCfUfGfCfaaccggags | 1094 | usCfsuccgGfuugcagAfcAfcauugs | 1942 |
| | {invAb} | | usu | |
| D-1006 | asasugugUfcUfGfCfAfaccggagas | 1095 | usUfscuccGfguugcaGfaCfacauus | 1943 |
| | {invAb} | | usu | |
| D-1007 | usgsugucUfgCfAfAfCfcggagaacs | 1096 | asGfsuucuCfcgguugCfaGfacacas | 1944 |
| | {invAb} | | usu | |
| D-1008 | gsusgucuGfcAfAfCfCfggagaacus | 1097 | asAfsguucUfccgguuGfcAfgacacs | 1945 |
| | {invAb} | | usu | |
| D-1009 | usgsucugCfaAfCfCfGfgagaacucs | 1098 | asGfsaguuCfuccgguUfgCfagacas | 1946 |
| | {invAb} | | usu | |
| D-1010 | gsuscugcAfaCfCfGfGfagaacucus | 1099 | asAfsgaguUfcuccggUfuGfcagacs | 1947 |
| | {invAb} | | usu | |
| D-1011 | uscsugcaAfcCfGfGfAfgaacucuus | 1100 | usAfsagagUfucuccgGfuUfgcagas | 1948 |
| | {invAb} | | usu | |
| D-1012 | csusgcaaCfcGfGfAfGfaacucuuas | 1101 | asUfsaagaGfuucuccGfgUfugcags | 1949 |
| | {invAb} | | usu | |
| D-1013 | usgscaacCfgGfAfGfAfacucuuags | 1102 | usCfsuaagAfguucucCfgGfuugcas | 1950 |
| | {invAb} | | usu | |
| D-1014 | gscsaaccGfgAfGfAfAfcucuuagas | 1103 | usUfscuaaGfaguucuCfcGfguugcs | 1951 |
| | {invAb} | | usu | |
| D-1015 | asasccggAfgAfAfCfUfcuuagaaas | 1104 | asUfsuucuAfagaguuCfuCfcgguus | 1952 |
| | {invAb} | | usu | |
| D-1016 | uscsuuagAfaAfGfAfAfccauccgas | 1105 | asUfscggaUfgguucuUfuCfuaagas | 1953 |
| | {invAb} | | usu | |
| D-1017 | csusuagaAfaGfAfAfCfcauccgaus | 1106 | asAfsucggAfugguucUfuUfcuaags | 1954 |
| | {invAb} | | usu | |
| D-1018 | ususagaaAfgAfAfCfCfauccgaucs | 1107 | usGfsaucgGfaugguuCfuUfucuaas | 1955 |
| | {invAb} | | usu | |
| D-1019 | asgsaaagAfaCfCfAfUfccgaucags | 1108 | asCfsugauCfggauggUfuCfuuucus | 1956 |
| | {invAb} | | usu | |
| D-1020 | asasagaaCfcAfUfCfCfgaucagcus | 1109 | asAfsgcugAfucggauGfgUfucuuus | 1957 |
| | {invAb} | | usu | |
| D-1021 | asasgaacCfaUfCfCfGfaucagcugs | 1110 | asCfsagcuGfaucggaUfgGfuucuus | 1958 |
| | {invAb} | | usu | |
| D-1022 | gsasaccaUfcCfGfAfUfcagcuguas | 1111 | asUfsacagCfugaucgGfaUfgguucs | 1959 |
| | {invAb} | | usu | |
| D-1023 | ascscaucCfgAfUfCfAfgcuguagas | 1112 | usUfscuacAfgcugauCfgGfauggus | 1960 |
| | {invAb} | | usu | |
| D-1024 | cscsgaucAfgCfUfGfUfagaacaacs | 1113 | usGfsuuguUfcuacagCfuGfaucggs | 1961 |
| | {invAb} | | usu | |
| D-1025 | gsasuguuAfaUfAfAfCfucuggaggs | 1114 | asCfscuccAfgaguuaUfuAfacaucs | 1962 |
| | {invAb} | | usu | |
| D-1026 | usasauaaCfuCfUfGfGfaggucaaas | 1115 | asUfsuugaCfcuccagAfgUfuauuas | 1963 |
| | {invAb} | | usu | |
| D-1027 | asusaacuCfuGfGfAfGfgucaaagus | 1116 | asAfscuuuGfaccuccAfgAfguuaus | 1964 |
| | {invAb} | | usu | |
| D-1028 | asuscuggAfaCfAfCfUfaucagcaus | 1117 | asAfsugcuGfauagugUfuCfcagaus | 1965 |
| | {invAb} | | usu | |
| D-1029 | asgsgaugAfaGfUfUfCfgacaugggs | 1118 | usCfsccauGfucgaacUfuCfauccus | 1966 |
| | {invAb} | | usu | |
| D-1030 | gsusucgaCfaUfGfGGfagagacaas | 1119 | asUfsugucUfcucccaUfgUfcgaacs | 1967 |
| | {invAb} | | usu | |
| D-1031 | csgsacauGfgGfAfGfAfgacaagggs | 1120 | usCfsccuuGfucucucCfcAfugucgs | 1968 |
| | {invAb} | | usu | |
| D-1032 | ascsauggGfaGfAfGfAfcaagggacs | 1121 | asGfsucccUfugucucUfcCfcaugus | 1969 |
| | {invAb} | | usu | |
| D-1033 | asusgggaGfaGfAfCfAfagggacuus | 1122 | usAfsagucCfcuugucUfcUfcccaus | 1970 |
| | {invAb} | | usu | |
| D-1034 | gsgsgagaGfaCfAfAfGfggacuuaus | 1123 | asAfsuaagUfcccuugUfcUfcucccs | 1971 |
| | {invAb} | | usu | |
| D-1035 | gsgsagagAfcAfAfGfGfgacuuaucs | 1124 | usGfsauaaGfucccuuGfuCfucuccs | 1972 |
| | {invAb} | | usu | |
| D-1036 | gsasgagaCfaAfGfGfGfacuuaucas | 1125 | usUfsgauaAfgucccuUfgUfcucucs | 1973 |
| | {invAb} | | usu | |
| D-1037 | gsascaagGfgAfCfUfUfaucaacaas | 1126 | usUfsuguuGfauaaguCfcCfuugucs | 1974 |
| | {invAb} | | usu | |
| D-1038 | ascsaaggGfaCfUfUfAfucaacaaas | 1127 | asUfsuuguUfgauaagUfcCfcuugus | 1975 |
| | {invAb} | | usu | |
| D-1039 | gsgsgacuUfaUfCfAfAfcaaagaaas | 1128 | usUfsuucuUfuguugaUfaAfgucccs | 1976 |
| | {invAb} | | usu | |
| D-1040 | asasgaaaAfuAfCfUfCfcuucugggs | 1129 | asCfsccagAfaggaguAfuUfuucuus | 1977 |
| | {invAb} | | usu | |
| D-1041 | asusacucCfuUfCfUfGfgguucaacs | 1130 | asGfsuugaAfcccagaAfgGfaguaus | 1978 |
| | {invAb} | | usu | |
| D-1042 | gsusucaaCfcAfCfCfUfugaugauus | 1131 | asAfsaucaUfcaagguGfgUfugaacs | 1979 |
| | {invAb} | | usu | |
| D-1043 | ususcaacCfaCfCfUfUfgaugauugs | 1132 | asCfsaaucAfucaaggUfgGfuugaas | 1980 |
| | {invAb} | | usu | |
| D-1044 | ususgaauAfcUfCfAfGfgaagucgas | 1133 | usUfscgacUfuccugaGfuAfuucaas | 1981 |
| | {invAb} | | usu | |
| D-1045 | ascsucagGfaAfGfUfCfgaaaaggus | 1134 | usAfsccuuUfucgacuUfcCfugagus | 1982 |
| | {invAb} | | usu | |
| D-1046 | csuscaggAfaGfUfCfGfaaaagguas | 1135 | asUfsaccuUfuucgacUfuCfcugags | 1983 |
| | {invAb} | | usu | |
| D-1047 | uscsaggaAfgUfCfGfAfaaagguacs | 1136 | usGfsuaccUfuuucgaCfuUfccugas | 1984 |
| | {invAb} | | usu | |
| D-1048 | asgsgaagUfcGfAfAfAfagguacacs | 1137 | usGfsuguaCfcuuuucGfaCfuuccus | 1985 |
| | {invAb} | | usu | |
| D-1049 | uscsgaaaAfgGfUfAfCfacaaaaaus | 1138 | usAfsuuuuUfguguacCfuUfuucgas | 1986 |
| | {invAb} | | usu | |
| D-1050 | csgsaaaaGfgUfAfCfAfcaaaaauas | 1139 | asUfsauuuUfuguguaCfcUfuuucgs | 1987 |
| | {invAb} | | usu | |
| D-1051 | gsasgaaaGfgAfGfCfAfagccuaaas | 1140 | asUfsuuagGfcuugcuCfcUfuucucs | 1988 |
| | {invAb} | | usu | |
| D-1052 | asgsaaagGfaGfCfAfAfgccuaaacs | 1141 | asGfsuuuaGfgcuugcUfcCfuuucus | 1989 |
| | {invAb} | | usu | |
| D-1053 | gsasaaggAfgCfAfAfGfccuaaacgs | 1142 | asCfsguuuAfggcuugCfuCfcuuucs | 1990 |
| | {invAb} | | usu | |
| D-1054 | asgsgagcAfaGfCfCfUfaaacgucas | 1143 | asUfsgacgUfuuaggcUfuGfcuccus | 1991 |
| | {invAb} | | usu | |
| D-1055 | gsgsagcaAfgCfCfUfAfaacgucags | 1144 | usCfsugacGfuuuaggCfuUfgcuccs | 1992 |
| | {invAb} | | usu | |
| D-1056 | gsasgcaaGfcCfUfAfAfacgucagas | 1145 | usUfscugaCfguuuagGfcUfugcucs | 1993 |
| | {invAb} | | usu | |
| D-1057 | asgscaagCfcUfAfAfAfcgucagaas | 1146 | usUfsucugAfcguuuaGfgCfuugcus | 1994 |
| | {invAb} | | usu | |
| D-1058 | gscsaagcCfuAfAfAfCfgucagaaas | 1147 | asUfsuucuGfacguuuAfgGfcuugcs | 1995 |
| | {invAb} | | usu | |
| D-1059 | csasagccUfaAfAfCfGfucagaaaus | 1148 | asAfsuuucUfgacguuUfaGfgcuugs | 1996 |
| | {invAb} | | usu | |
| D-1060 | asasgccuAfaAfCfGfUfcagaaaucs | 1149 | asGfsauuuCfugacguUfuAfggcuus | 1997 |
| | {invAb} | | usu | |
| D-1061 | gsuscagaAfaUfCfCfAfguacuaaas | 1150 | asUfsuuagUfacuggaUfuUfcugacs | 1998 |
| | {invAb} | | usu | |
| D-1062 | uscsagaaAfuCfCfAfGfuacuaaacs | 1151 | asGfsuuuaGfuacuggAfuUfucugas | 1999 |
| | {invAb} | | usu | |
| D-1063 | ususucugAfgCfUfUfCfaugacaaus | 1152 | asAfsuuguCfaugaagCfuCfagaaas | 2000 |
| | {invAb} | | usu | |
| D-1064 | asgscuucAfuGfAfCfAfaucaggacs | 1153 | asGfsuccuGfauugucAfuGfaagcus | 2001 |
| | {invAb} | | usu | |
| D-1065 | ususcaugAfcAfAfUfCfaggacggus | 1154 | asAfsccguCfcugauuGfuCfaugaas | 2002 |
| | (invAb} | | usu | |
| D-1066 | uscsaugaCfaAfUfCfAfggacggucs | 1155 | asGfsaccgUfccugauUfgUfcaugas | 2003 |
| | {invAb} | | usu | |
| D-1067 | csasugacAfaUfCfAfGfgacggucus | 1156 | asAfsgaccGfuccugaUfuGfucaugs | 2004 |
| | {invAb} | | usu | |
| D-1068 | asusgacaAfuCfAfGfGfacggucuus | 1157 | asAfsagacCfguccugAfuUfgucaus | 2005 |
| | {invAb} | | usu | |
| D-1069 | usgsacaaUfcAfGfGfAfcggucuugs | 1158 | asCfsaagaCfcguccuGfaUfugucas | 2006 |
| | {invAb} | | usu | |
| D-1070 | gsascaauCfaGfGfAfCfggucuugus | 1159 | asAfscaagAfccguccUfgAfuugucs | 2007 |
| | {invAb} | | usu | |
| D-1071 | ascsaaucAfgGfAfCfGfgucuugugs | 1160 | usCfsacaaGfaccgucCfuGfauugus | 2008 |
| | {invAb} | | usu | |
| D-1072 | asasucagGfaCfGfGfUfcuugugaas | 1161 | asUfsucacAfagaccgUfcCfugauus | 2009 |
| | {invAb} | | usu | |
| D-1073 | asuscaggAfcGfGfUfCfuugugaaus | 1162 | usAfsuucaCfaagaccGfuCfcugaus | 2010 |
| | {invAb} | | usu | |
| D-1074 | uscsaggaCfgGfUfCfUfugugaauas | 1163 | asUfsauucAfcaagacCfgUfccugas | 2011 |
| | {invAb} | | usu | |
| D-1075 | gsgsucuuGfuGfAfAfUfauggaaags | 1164 | asCfsuuucCfauauucAfcAfagaccs | 2012 |
| | {invAb} | | usu | |
| D-1076 | gsasaaguCfuCfAfAfUfuccacacgs | 1165 | usCfsguguGfgaauugAfgAfcuuucs | 2013 |
| | {invAb} | | usu | |
| D-1077 | asasagucUfcAfAfUfUfccacacgas | 1166 | asUfscgugUfggaauuGfaGfacuuus | 2014 |
| | {invAb} | | usu | |
| D-1078 | asasgucuCfaAfUfUfCfcacacgaus | 1167 | asAfsucguGfuggaauUfgAfgacuus | 2015 |
| | {invAb} | | usu | |
| D-1079 | asgsucucAfaUfUfCfCfacacgaucs | 1168 | asGfsaucgUfguggaaUfuGfagacus | 2016 |
| | {invAb} | | usu | |
| D-1080 | gsuscucaAfuUfCfCfAfcacgaucus | 1169 | asAfsgaucGfuguggaAfuUfgagacs | 2017 |
| | {invAb} | | usu | |
| D-1081 | uscsucaaUfuCfCfAfCfacgaucucs | 1170 | usGfsagauCfguguggAfaUfugagas | 2018 |
| | {invAb} | | usu | |
| D-1082 | csuscaauUfcCfAfCfAfcgaucucas | 1171 | asUfsgagaUfcgugugGfaAfuugags | 2019 |
| | {invAb} | | usu | |
| D-1083 | uscsaauuCfcAfCfAfCfgaucucaus | 1172 | asAfsugagAfucguguGfgAfauugas | 2020 |
| | {invAb} | | usu | |
| D-1084 | csasauucCfaCfAfCfGfaucucaugs | 1173 | usCfsaugaGfaucgugUfgGfaauugs | 2021 |
| | {invAb} | | usu | |
| D-1085 | asusuccaCfaCfGfAfUfcucaugags | 1174 | usCfsucauGfagaucgUfgUfggaaus | 2022 |
| | {invAb} | | usu | |
| D-1086 | ususccacAfcGfAfUfCfucaugagas | 1175 | asUfscucaUfgagaucGfuGfuggaas | 2023 |
| | {invAb} | | usu | |
| D-1087 | uscscacaCfgAfUfCfUfcaugagags | 1176 | usCfsucucAfugagauCfgUfguggas | 2024 |
| | {invAb} | | usu | |
| D-1088 | csascgauCfuCfAfUfGfagagaacus | 1177 | asAfsguucUfcucaugAfgAfucgugs | 2025 |
| | {invAb} | | usu | |
| D-1089 | uscsucauGfaGfAfGfAfacuggaccs | 1178 | asGfsguccAfguucucUfcAfugagas | 2026 |
| | {invAb} | | usu | |
| D-1090 | uscsaugaGfaGfAfAfCfuggaccugs | 1179 | usCfsagguCfcaguucUfcUfcaugas | 2027 |
| | {invAb} | | usu | |
| D-1091 | csasugagAfgAfAfCfUfggaccugas | 1180 | asUfscaggUfccaguuCfuCfucaugs | 2028 |
| | {invAb} | | usu | |
| D-1092 | ususgaauGfgAfUfGfUfcugaugaas | 1181 | usUfsucauCfagacauCfcAfuucaas | 2029 |
| | {invAb} | | usu | |
| D-1093 | gsgsuggaCfaCfAfCfUfcagcauuus | 1182 | asAfsaaugCfugagugUfgUfccaccs | 2030 |
| | {invAb} | | usu | |
| D-1094 | ususugagAfgCfCfCfCfacaaugaas | 1183 | asUfsucauUfguggggCfuCfucaaas | 2031 |
| | {invAb} | | usu | |
| D-1095 | asuscccaGfcCfUfAfUfcugacaccs | 1184 | usGfsguguCfagauagGfcUfgggaus | 2032 |
| | {invAb} | | usu | |
| D-1096 | uscsccagCfcUfAfUfCfugacaccas | 1185 | usUfsggugUfcagauaGfgCfugggas | 2033 |
| | {invAb} | | usu | |
| D-1097 | cscscagcCfuAfUfCfUfgacaccaas | 1186 | usUfsugguGfucagauAfgGfcugggs | 2034 |
| | {invAb} | | usu | |
| D-1098 | cscsagccUfaUfCfUfGfacaccaaas | 1187 | asUfsuuggUfgucagaUfaGfgcuggs | 2035 |
| | {invAb} | | usu | |
| D-1099 | csasgccuAfuCfUfGfAfcaccaaacs | 1188 | usGfsuuugGfugucagAfuAfggcugs | 2036 |
| | {invAb} | | usu | |
| D-1100 | asgscagaGfaAfAfUfCfaagaugccs | 1189 | asGfsgcauCfuugauuUfcUfcugcus | 2037 |
| | {invAb} | | usu | |
| D-1101 | gsasgcuuUfgUfCfUfCfcgaagugcs | 1190 | asGfscacuUfcggagaCfaAfagcucs | 2038 |
| | {invAb} | | usu | |
| D-1102 | usgsucucCfgAfAfGfUfgccccagus | 1191 | asAfscuggGfgcacuuCfgGfagacas | 2039 |
| | {invAb} | | usu | |
| D-1103 | csusccgaAfgUfGfCfCfccagucggs | 1192 | usCfscgacUfggggcaCfuUfcggags | 2040 |
| | {invAb} | | usu | |
| D-1104 | uscscgaaGfuGfCfCfCfcagucggas | 1193 | asUfsccgaCfuggggcAfcUfucggas | 2041 |
| | {invAb} | | usu | |
| D-1105 | asgsaacuGfgGfAfAfGfagccuaucs | 1194 | asGfsauagGfcucuucCfcAfguucus | 2042 |
| | {invAb} | | usu | |
| D-1106 | gsasacugGfgAfAfGfAfgccuauccs | 1195 | asGfsgauaGfgcucuuCfcCfaguucs | 2043 |
| | {invAb} | | usu | |
| D-1107 | asasgagcCfuAfUfCfCfcugcuuucs | 1196 | asGfsaaagCfagggauAfgGfcucuus | 2044 |
| | {invAb} | | usu | |
| D-1108 | asgsgcugGfgCfGfCfCfugauccgus | 1197 | asAfscggaUfcaggcgCfcCfagccus | 2045 |
| | {invAb} | | usu | |
| D-1109 | gsgscuggGfcGfCfCfUfgauccgucs | 1198 | usGfsacggAfucaggcGfcCfcagccs | 2046 |
| | {invAb} | | usu | |
| D-1110 | gscsugggCfgCfCfUfGfauccgucas | 1199 | asUfsgacgGfaucaggCfgCfccagcs | 2047 |
| | {invAb} | | usu | |
| D-1111 | csusgggcGfcCfUfGfAfuccgucags | 1200 | asCfsugacGfgaucagGfcGfcccags | 2048 |
| | {invAb} | | usu | |
| D-1112 | usgsggcgCfcUfGfAfUfccgucagcs | 1201 | asGfscugaCfggaucaGfgCfgcccas | 2049 |
| | {invAb} | | usu | |
| D-1113 | csusggacGfaAfGfAfCfagcgacccs | 1202 | asGfsggucGfcugucuUfcGfuccags | 2050 |
| | {invAb} | | usu | |
| D-1114 | ascscccaUfgCfUfCfUfcuccucggs | 1203 | asCfscgagGfagagagCfaUfggggus | 2051 |
| | {invAb} | | usu | |
| D-1115 | csasugcuCfuCfUfCfCfucgguucus | 1204 | usAfsgaacCfgaggagAfgAfgcaugs | 2052 |
| | {invAb} | | usu | |
| D-1116 | asusgcucUfcUfCfCfUfcgguucuas | 1205 | asUfsagaaCfcgaggaGfaGfagcaus | 2053 |
| | {invAb} | | usu | |
| D-1117 | gscsucucUfcCfUfCfGfguucuacgs | 1206 | asCfsguagAfaccgagGfaGfagagcs | 2054 |
| | {invAb} | | usu | |
| 0-1118 | csuscucuCfcUfCfGfGfuucuacgcs | 1207 | asGfscguaGfaaccgaGfgAfgagags | 2055 |
| | {invAb} | | usu | |
| D-1119 | uscsucucCfuCfGfGfUfucuacgcus | 1208 | asAfsgcguAfgaaccgAfgGfagagas | 2056 |
| | {invAb} | | usu | |
| D-1120 | csuscuccUfcGfGfUfUfcuacgcuus | 1209 | usAfsagcgUfagaaccGfaGfgagags | 2057 |
| | {invAb} | | usu | |
| D-1121 | uscsuccuCfgGfUfUfCfuacgcuuas | 1210 | asUfsaagcGfuagaacCfgAfggagas | 2058 |
| | {invAb} | | usu | |
| D-1122 | csusccucGfgUfUfCfUfacgcuuaus | 1211 | asAfsuaagCfguagaaCfcGfaggags | 2059 |
| | {invAb} | | usu | |
| D-1123 | uscscucgGfuUfCfUfAfcgcuuaugs | 1212 | asCfsauaaGfcguagaAfcCfgaggas | 2060 |
| | {invAb} | | usu | |
| D-1124 | cscsucggUfuCfUfAfCfgcuuauggs | 1213 | asCfscauaAfgcguagAfaCfcgaggs | 2061 |
| | {invAb} | | usu | |
| D-1125 | csuscgguUfcUfAfCfGfcuuaugggs | 1214 | asCfsccauAfagcguaGfaAfccgags | 2062 |
| | {invAb} | | usu | |
| D-1126 | csasccaaAfcUfCfCfCfauucuuucs | 1215 | usGfsaaagAfaugggaGfuUfuggugs | 2063 |
| | {invAb} | | usu | |
| D-1127 | cscsaaacUfcCfCfAfUfucuuucaus | 1216 | asAfsugaaAfgaauggGfaGfuuuggs | 2064 |
| | {invAb} | | usu | |
| D-1128 | csuscccaUfuCfUfUfUfcaugaggcs | 1217 | asGfsccucAfugaaagAfaUfgggags | 2065 |
| | {invAb} | | usu | |
| D-1129 | csasuucuUfuCfAfUfGfaggcggcgs | 1218 | usCfsgccgCfcucaugAfaAfgaaugs | 2066 |
| | {invAb} | | usu | |
| D-1130 | asusucuuUfcAfUfGfAfggcggcgas | 1219 | usUfscgccGfccucauGfaAfagaaus | 2067 |
| | {invAb} | | usu | |
| D-1131 | ususcuuuCfaUfGfAfGfgcggcgaas | 1220 | asUfsucgcCfgccucaUfgAfaagaas | 2068 |
| | {invAb} | | usu | |
| D-1132 | uscsuuucAfuGfAfGfGfcggcgaags | 1221 | asCfsuucgCfcgccucAfuGfaaagas | 2069 |
| | {invAb} | | usu | |
| D-1133 | csusuucaUfgAfGfGfCfggcgaagcs | 1222 | asGfscuucGfccgccuCfaUfgaaags | 2070 |
| | {invAb} | | usu | |
| D-1134 | ususucauGfaGfGfCfGfgcgaagcus | 1223 | asAfsgcuuCfgccgccUfcAfugaaas | 2071 |
| | {invAb} | | usu | |
| D-1135 | uscsucugGfgGfUfCfCfuaugaugas | 1224 | asUfscaucAfuaggacCfcCfagagas | 2072 |
| | {invAb} | | usu | |
| D-1136 | ascsaccuGfcCfCfAfGfcucacacgs | 1225 | usCfsguguGfagcuggGfcAfggugus | 2073 |
| | {invAb} | | usu | |
| D-1137 | csasccugCfcCfAfGfCfucacacgas | 1226 | usUfscgugUfgagcugGfgCfaggugs | 2074 |
| | {invAb} | | usu | |
| D-1138 | cscsugccCfaGfCfUfCfacacgaags | 1227 | asCfsuucgUfgugagcUfgGfgcaggs | 2075 |
| | {invAb} | | usu | |
| D-1139 | cscsagcuCfaCfAfCfGfaaggauucs | 1228 | usGfsaaucCfuucgugUfgAfgcuggs | 2076 |
| | {invAb} | | usu | |
| D-1140 | asgscucaCfaCfGfAfAfggauucags | 1229 | usCfsugaaUfccuucgUfgUfgagcus | 2077 |
| | {invAb} | | usu | |
| D-1141 | asusccggAfaGfUfUfUfgaagauags | 1230 | usCfsuaucUfucaaacUfuCfcggaus | 2078 |
| | {invAb} | | usu | |
| D-1142 | csgsgaagUfuUfGfAfAfgauagauus | 1231 | asAfsaucuAfucuucaAfaCfuuccgs | 2079 |
| | {invAb} | | usu | |
| D-1143 | asgsuuugAfaGfAfUfAfgauucgaas | 1232 | asUfsucgaAfucuaucUfuCfaaacus | 2080 |
| | {invAb} | | usu | |
| D-1144 | gsusuugaAfgAfUfAfGfauucgaags | 1233 | usCfsuucgAfaucuauCfuUfcaaacs | 2081 |
| | {invAb} | | usu | |
| D-1145 | gsasagauAfgAfUfUfCfgaagaagas | 1234 | asUfscuucUfucgaauCfuAfucuucs | 2082 |
| | (invAb} | | usu | |
| D-1146 | asgsaagaAfgUfAfCfAfgaccuuccs | 1235 | asGfsgaagGfucuguaCfuUfcuucus | 2083 |
| | {invAb} | | usu | |
| D-1147 | gsasagaaGfuAfCfAfGfaccuucccs | 1236 | usGfsggaaGfgucuguAfcUfucuucs | 2084 |
| | {invAb} | | usu | |
| D-1148 | asasgaagUfaCfAfGfAfccuucccas | 1237 | asUfsgggaAfggucugUfaCfuucuus | 2085 |
| | {invAb} | | usu | |
| D-1149 | uscsugaaAfuGfGfAfCfaaaugaccs | 1238 | asGfsgucaUfuuguccAfuUfucagas | 2086 |
| | {invAb} | | usu | |
| D-1150 | csusgaaaUfgGfAfCfAfaaugaccus | 1239 | asAfsggucAfuuugucCfaUfuucags | 2087 |
| | {invAb} | | usu | |
| D-1151 | ascsaaauGfaCfCfUfUfgccaaauus | 1240 | asAfsauuuGfgcaaggUfcAfuuugus | 2088 |
| | {invAb} | | usu | |
| D-1152 | asasaugaCfcUfUfGfCfcaaauuccs | 1241 | asGfsgaauUfuggcaaGfgUfcauuus | 2089 |
| | {invAb} | | usu | |
| D-1153 | asasugacCfuUfGECECfaaauuccgs | 1242 | asCfsggaaUfuuggcaAfgGfucauus | 2090 |
| | {invAb} | | usu | |
| D-1154 | usgsaccuUfgCfCfAfAfauuccggas | 1243 | asUfsccggAfauuuggCfaAfggucas | 2091 |
| | {invAb} | | usu | |
| D-1155 | gsasccuuGfcCfAfAfAfuuccggags | 1244 | usCfsuccgGfaauuugGfcAfaggucs | 2092 |
| | {invAb} | | usu | |
| D-1156 | ascscuugCfcAfAfAfUfuccggagas | 1245 | asUfscuccGfgaauuuGfgCfaaggus | 2093 |
| | {invAb} | | usu | |
| D-1157 | cscsuugcCfaAfAfUfUfccggagacs | 1246 | usGfsucucCfggaauuUfgGfcaaggs | 2094 |
| | {invAb} | | usu | |
| D-1158 | cscsggagAfcAfAfCfUfuaaagaaus | 1247 | asAfsuucuUfuaaguuGfuCfuccggs | 2095 |
| | {invAb} | | usu | |
| D-1159 | csgsgagaCfaAfCfUfUfaaagaaucs | 1248 | usGfsauucUfuuaaguUfgUfcuccgs | 2096 |
| | (invAb} | | usu | |
| D-1160 | asgsauauCfuGfAfAfGfaggaccuas | 1249 | usUfsagguCfcucuucAfgAfuaucus | 2097 |
| | {invAb} | | usu | |
| D-1161 | gsasggacCfuAfAfCfUfcccaggaus | 1250 | asAfsuccuGfggaguuAfgGfuccucs | 2098 |
| | {invAb} | | usu | |
| D-1162 | gsasccuaAfcUfCfCfCfaggaugcgs | 1251 | asCfsgcauCfcugggaGfuUfaggucs | 2099 |
| | {invAb} | | usu | |
| D-1163 | ascscuaaCfuCfCfCfAfggaugcggs | 1252 | asCfscgcaUfccugggAfgUfuaggus | 2100 |
| | {invAb} | | usu | |
| D-1164 | usgscggcAfgCfGfAfAfgcaacacas | 1253 | asUfsguguUfgcuucgCfuGfccgcas | 2101 |
| | {invAb} | | usu | |
| D-1165 | gscsggcaGfcGfAfAfGfcaacacacs | 1254 | asGfsugugUfugcuucGfcUfgccgcs | 2102 |
| | {invAb} | | usu | |
| D-1166 | csasgcgaAfgCfAfAfCfacacucccs | 1255 | asGfsggagUfguguugCfuUfcgcugs | 2103 |
| | {invAb} | | usu | |
| D-1167 | gscsgaagCfaAfCfAfCfacuccccas | 1256 | usUfsggggAfguguguUfgCfuucgcs | 2104 |
| | {invAb} | | usu | |
| D-1168 | gscsaacaCfaCfUfCfCfccaagagus | 1257 | asAfscucuUfggggagUfgUfguugcs | 2105 |
| | {invAb} | | usu | |
| D-1169 | csasagagUfuUfUfGfGfuucccaacs | 1258 | asGfsuuggGfaaccaaAfaCfucuugs | 2106 |
| | {invAb} | | usu | |
| D-1170 | gsasguuuUfgGfUfUfCfccaacuugs | 1259 | usCfsaaguUfgggaacCfaAfaacucs | 2107 |
| | {invAb} | | usu | |
| D-1171 | gsusuuugGfuUfCfCfCfaacuugags | 1260 | usCfsucaaGfuugggaAfcCfaaaacs | 2108 |
| | {invAb} | | usu | |
| D-1172 | ususgaagCfcAfCfAfUfuggaaucus | 1261 | usAfsgauuCfcaauguGfgCfuucaas | 2109 |
| | {invAb} | | usu | |
| D-1173 | cscsaggaGfaAfGfCfGfagcggaaas | 1262 | asUfsuuccGfcucgcuUfcUfccuggs | 2110 |
| | {invAb} | | usu | |
| D-1174 | gsasccagAfuUfGfCfUfaaugagaas | 1263 | usUfsucucAfuuagcaAfuCfuggucs | 2111 |
| | {invAb} | | usu | |
| D-1175 | gscsuaauGfaGfAfAfAfguggcucus | 1264 | asAfsgagcCfacuuucUfcAfuuagcs | 2112 |
| | {invAb} | | usu | |
| D-1176 | asgscauuCfaUfGfGfAfcggccggus | 1265 | usAfsccggCfcguccaUfgAfaugcus | 2113 |
| | {invAb] | | usu | |
| D-1177 | gscsauucAfuGfGfAfCfggccgguas | 1266 | usUfsaccgGfccguccAfuGfaaugcs | 2114 |
| | {invAb} | | usu | |
| D-1178 | csasuucaUfgGfAfCfGfgccgguaas | 1267 | asUfsuaccGfgccgucCfaUfgaaugs | 2115 |
| | {invAb} | | usu | |
| D-1179 | asusucauGfgAfCfGfGfccgguaacs | 1268 | usGfsuuacCfggccguCfcAfugaaus | 2116 |
| | {invAb} | | usu | |
| D-1180 | ususcaugGfaCfGfGfCfcgguaacas | 1269 | usUfsguuaCfcggccgUfcCfaugaas | 2117 |
| | {invAb} | | usu | |
| D-1181 | uscsauggAfcGfGfCfCfgguaacaas | 1270 | usUfsuguuAfccggccGfuCfcaugas | 2118 |
| | {invAb} | | usu | |
| D-1182 | asusggacGfgCfCfGfGfuaacaaags | 1271 | usCfsuuugUfuaccggCfcGfuccaus | 2119 |
| | {invAb} | | usu | |
| D-1183 | usgsgacgGfcCfGfGfUfaacaaagas | 1272 | usUfscuuuGfuuaccgGfcCfguccas | 2120 |
| | {invAb} | | usu | |
| D-1184 | gsgsacggCfcGfGfUfAfacaaagaas | 1273 | asUfsucuuUfguuaccGfgCfcguccs | 2121 |
| | {invAb] | | usu | |
| D-1185 | ascsggccGfgUfAfAfCfaaagaacgs | 1274 | usCfsguucUfuuguuaCfcGfgccgus | 2122 |
| | {invAb} | | usu | |
| D-1186 | csgsgccgGfuAfAfCfAfaagaacgas | 1275 | usUfscguuCfuuuguuAfcCfggccgs | 2123 |
| | {invAb} | | usu | |
| D-1187 | gsgsccggUfaAfCfAfAfagaacgaas | 1276 | asUfsucguUfcuuuguUfaCfcggccs | 2124 |
| | {invAb | | usu | |
| D-1188 | gscscgguAfaCfAfAfAfgaacgaacs | 1277 | asGfsuucgUfucuuugUfuAfccggcs | 2125 |
| | {invAb} | | usu | |
| D-1189 | cscsgguaAfcAfAfAfGfaacgaacgs | 1278 | asCfsguucGfuucuuuGfuUfaccggs | 2126 |
| | {invAb} | | usu | |
| D-1190 | csgsguaaCfaAfAfGfAfacgaacggs | 1279 | asCfscguuCfguucuuUfgUfuaccgs | 2127 |
| | {invAb} | | usu | |
| D-1191 | gsgsuaacAfaAfGAfAfcgaacggcs | 1280 | usGfsccguUfcguucuUfuGfuuaccs | 2128 |
| | {invAb} | | usu | |
| D-1192 | asasagaaCfgAfAfCfGfgcaggugas | 1281 | asUfscaccUfgccguuCfgUfucuuus | 2129 |
| | {invAb} | | usu | |
| D-1193 | asusgaagCfcAfCfUfAfuacgacags | 1282 | asCfsugucGfuauaguGfgCfuucaus | 2130 |
| | {invAb} | | usu | |
| D-1194 | gsasagccAfcUfAfUfAfcgacaggus | 1283 | usAfsccugUfcguauaGfuGfgcuucs | 2131 |
| | {invAb} | | usu | |
| D-1195 | asasgccaCfuAfUfAfCfgacagguas | 1284 | asUfsaccuGfucguauAfgUfggcuus | 2132 |
| | {invAb} | | usu | |
| D-1196 | asgsccacUfaUfAfCfGfacagguacs | 1285 | asGfsuaccUfgucguaUfaGfuggcus | 2133 |
| | {invAb} | | usu | |
| D-1197 | gscscacuAfuAfCfGfAfcagguaccs | 1286 | asGfsguacCfugucguAfuAfguggcs | 2134 |
| | {invAb} | | usu | |
| D-1198 | cscsacuaUfaCfGfAfCfagguaccgs | 1287 | asCfsgguaCfcugucgUfaUfaguggs | 2135 |
| | {invAb} | | usu | |
| D-1199 | csascuauAfcGfAfCfAfgguaccggs | 1288 | asCfscgguAfccugucGfuAfuagugs | 2136 |
| | {invAb} | | usu | |
| D-1200 | ascsuauaCfgAfCfAfGfguaccggcs | 1289 | asGfsccggUfaccuguCfgUfauagus | 2137 |
| | {invAb} | | usu | |
| D-1201 | asascagaUfcCfUfCfUfcccgagcus | 1290 | usAfsgcucGfggagagGfaUfcuguus | 2138 |
| | {invAb} | | usu | |
| D-1202 | ascsagauCfcUfCfUfCfccgagcuas | 1291 | usUfsagcuCfgggagaGfgAfucugus | 2139 |
| | {invAb} | | usu | |
| D-1203 | asgsauccUfcUfCfCfCfgagcuaacs | 1292 | usGfsuuagCfucgggaGfaGfgaucus | 2140 |
| | {invAb} | | usu | |
| D-1204 | uscscucuCfcCfGfAfGfcuaacaccs | 1293 | usGfsguguUfagcucgGfgAfgaggas | 2141 |
| | {invAb} | | usu | |
| D-1205 | cscsucucCfcGfAfGfCfuaacaccas | 1294 | asUfsggugUfuagcucGfgGfagaggs | 2142 |
| | {invAb} | | usu | |
| D-1206 | csuscuccCfgAfGfCfUfaacaccaus | 1295 | usAfsugguGfuuagcuCfgGfgagags | 2143 |
| | {invAb} | | usu | |
| D-1207 | uscsccgaGfcUfAfAfCfaccauaccs | 1296 | asGfsguauGfguguuaGfcUfcgggas | 2144 |
| | {invAb} | | usu | |
| D-1208 | cscscgagCfuAfAfCfAfccauacccs | 1297 | usGfsgguaUfgguguuAfgCfucgggs | 2145 |
| | {invAb} | | usu | |
| D-1209 | gsgsggucAfgAfAfGfAfcgauagcas | 1298 | usUfsgcuaUfcgucuuCfuGfaccccs | 2146 |
| | {invAb} | | usu | |
| D-1210 | gsgsgucaGfaAfGfAfCfgauagcaas | 1299 | asUfsugcuAfucgucuUfcUfgacccs | 2147 |
| | {invAb} | | usu | |
| D-1211 | gsuscagaAfgAfCfGfAfuagcaaugs | 1300 | asCfsauugCfuaucguCfuUfcugacs | 2148 |
| | {invAb} | | usu | |
| D-1212 | uscsagaaGfaCfGfAfUfagcaaugus | 1301 | asAfscauuGfcuaucgUfcUfucugas | 2149 |
| | {invAb} | | usu | |
| D-1213 | gsasagacGfaUfAfGfCfaaugugaas | 1302 | asUfsucacAfuugcuaUfcGfucuucs | 2150 |
| | {invAb} | | usu | |
| D-1214 | asgsacgaUfaGfCfAfAfugugaagcs | 1303 | asGfscuucAfcauugcUfaUfcgucus | 2151 |
| | {invAb} | | usu | |
| D-1215 | asusggucAfcUfCfUfGfaaaaccgas | 1304 | asUfscgguUfuucagaGfuGfaccaus | 2152 |
| | {invAb} | | usu | |
| D-1216 | usgsgucaCfuCfUfGfAfaaaccgaus | 1305 | asAfsucggUfuuucagAfgUfgaccas | 2153 |
| | {invAb} | | usu | |
| D-1217 | gsgsucacUfcUfGfAfAfaaccgauus | 1306 | asAfsaucgGfuuuucaGfaGfugaccs | 2154 |
| | {invAb} | | usu | |
| D-1218 | gsasaaacCfgAfUfUfUfcagugcacs | 1307 | asGfsugcaCfugaaauCfgGfuuuucs | 2155 |
| | {invAb} | | usu | |
| D-1219 | asasccgaUfuUfCfAfGfugcacgaus | 1308 | asAfsucguGfcacugaAfaUfcgguus | 2156 |
| | {invAb} | | usu | |
| D-1220 | usasuuucCfcCfAfAfUfggaugauas | 1309 | usUfsaucaUfccauugGfgGfaaauas | 2157 |
| | {invAb} | | usu | |
| D-1221 | cscscaauGfgAfUfGfAfuaaaauacs | 1310 | asGfsuauuUfuaucauCfcAfuugggs | 2158 |
| | {invAb} | | usu | |
| D-1222 | csasauggAfuGfAfUfAfaaauaccas | 1311 | asUfsgguaUfuuuaucAfuCfcauugs | 2159 |
| | {invAb} | | usu | |
| D-1223 | usgsgaugAfuAfAfAfAfuaccaucas | 1312 | usUfsgaugGfuauuuuAfuCfauccas | 2160 |
| | {invAb} | | usu | |
| D-1224 | asasauacCfaUfCfAfAfaaugcagcs | 1313 | asGfscugcAfuuuugaUfgGfuauuus | 2161 |
| | {invAb} | | usu | |
| D-1225 | gsgsgcuuUfcAfAfAfUfcuccaugcs | 1314 | asGfscaugGfagauuuGfaAfagcccs | 2162 |
| | {invAb} | | usu | |
| D-1226 | gsgscuuuCfaAfAfUfCfuccaugcus | 1315 | asAfsgcauGfgagauuUfgAfaagccs | 2163 |
| | {invAb} | | usu | |
| D-1227 | asasucucCfaUfGfCfUfgccucaaus | 1316 | usAfsuugaGfgcagcaUfgGfagauus | 2164 |
| | {invAb} | | usu | |
| D-1228 | asuscuccAfuGfCfUfGfccucaauas | 1317 | asUfsauugAfggcagcAfuGfgagaus | 2165 |
| | {invAb} | | usu | |
| D-1229 | uscsuccaUfgCfUfGfCfcucaauacs | 1318 | asGfsuauuGfaggcagCfaUfggagas | 2166 |
| | {invAb} | | usu | |
| D-1230 | csusgccuCfaAfUfAfCfcugaacucs | 1319 | asGfsaguuCfagguauUfgAfggcags | 2167 |
| | {invAb} | | usu | |
| D-1231 | csusggaaCfaCfCfUfCfcaggaaaus | 1320 | asAfsuuucCfuggaggUfgUfuccags | 2168 |
| | {invAb} | | usu | |
| D-1232 | csusucggGfaUfUfUfUfgaagacaas | 1321 | asUfsugucUfucaaaaUfcCfcgaags | 2169 |
| | {invAb} | | usu | |
| D-1233 | cscsagaaGfgAfAfGfAfccgcacucs | 1322 | asGfsagugCfggucuuCfcUfucuggs | 2170 |
| | {invAb} | | usu | |
| D-1234 | gsasaggaAfgAfCfCfGfcacuccuas | 1323 | asUfsaggaGfugcgguCfuUfccuucs | 2171 |
| | {invAb} | | usu | |
| D-1235 | asasggaaGfaCfCfGfCfacuccuaus | 1324 | asAfsuaggAfgugcggUfcUfuccuus | 2172 |
| | {invAb} | | usu | |
| D-1236 | asgsgaagAfcCfGfCfAfcuccuaugs | 1325 | asCfsauagGfagugcgGfuCfuuccus | 2173 |
| | {invAb} | | usu | |
| D-1237 | gsgsaagaCfcGfCfAfCfuccuauggs | 1326 | asCfscauaGfgagugcGfgUfcuuccs | 2174 |
| | {invAb} | | usu | |
| D-1238 | gsasagacCfgCfAfCfUfccuauggcs | 1327 | asGfsccauAfggagugCfgGfucuucs | 2175 |
| | {invAb} | | usu | |
| D-1239 | asgsaccgCfaCfUfCfCfuauggcugs | 1328 | usCfsagccAfuaggagUfgCfggucus | 2176 |
| | {invAb} | | usu | |
| D-1240 | cscsgcacUfcCfUfAfUfggcugaags | 1329 | usCfsuucaGfccauagGfaGfugcggs | 2177 |
| | {invAb} | | usu | |
| D-1241 | usasagcaCfaUfAfAfAfggcgaaacs | 1330 | asGfsuuucGfccuuuaUfgUfgcuuas | 2178 |
| | {invAb} | | usu | |
| D-1242 | asasgcacAfuAfAfAfGfgcgaaacus | 1331 | asAfsguuuCfgccuuuAfuGfugcuus | 2179 |
| | {invAb} | | usu | |
| D-1243 | gscsacauAfaAfGfGfCfgaaacugas | 1332 | asUfscaguUfucgccuUfuAfugugcs | 2180 |
| | {invAb} | | usu | |
| D-1244 | gsasuuccAfaGfUfCfCfaugugaggs | 1333 | asCfscucaCfauggacUfuGfgaaucs | 2181 |
| | {invAb} | | usu | |
| D-1245 | asusuccaAfgUfCfCfAfugugagggs | 1334 | asCfsccucAfcauggaCfuUfggaaus | 2182 |
| | {invAb} | | usu | |
| D-1246 | cscsaaguCfcAfUfGfUfgaggggcas | 1335 | asUfsgcccCfucacauGfgAfcuuggs | 2183 |
| | {invAb} | | usu | |
| D-1247 | csasagucCfaUfGfUfGfaggggcaus | 1336 | asAfsugccCfcucacaUfgGfacuugs | 2184 |
| | {invAb} | | usu | |
| D-1248 | gsusccauGfuGfAfGfGfggcauggcs | 1337 | asGfsccauGfccccucAfcAfuggacs | 2185 |
| | {invAb} | | usu | |
| D-1249 | gscsagcuGfcGfGfUfGfagaguuuas | 1338 | asUfsaaacUfcucaccGfcAfgcugcs | 2186 |
| | {invAb} | | usu | |
| D-1250 | asgscugcGfgUfGfAfGfaguuuacus | 1339 | asAfsguaaAfcucucaCfcGfcagcus | 2187 |
| | {invAb} | | usu | |
| D-1251 | cscscagaGfaAfAfGfUfgcagcucus | 1340 | asAfsgagcUfgcacuuUfcUfcugggs | 2188 |
| | {invAb} | | usu | |
| D-1252 | csasaagcAfuGfCfAfGfcccuucugs | 1341 | asCfsagaaGfggcugcAfuGfcuuugs | 2189 |
| | {invAb} | | usu | |
| D-1253 | cscsuucuGfcCfUfCfUfagaccauus | 1342 | asAfsauggUfcuagagGfcAfgaaggs | 2190 |
| | {invAb} | | usu | |
| D-1254 | uscsugccUfcUfAfGfAfccauuuggs | 1343 | asCfscaaaUfggucuaGfaGfgcagas | 2191 |
| | {invAb} | | usu | |
| D-1255 | uscsuagaCfcAfUfUfUfggcaucggs | 1344 | asCfscgauGfccaaauGfgUfcuagas | 2192 |
| | {invAb} | | usu | |
| D-1256 | csusagacCfaUfUfUfGfgcaucggcs | 1345 | asGfsccgaUfgccaaaUfgGfucuags | 2193 |
| | {invAb} | | usu | |
| D-1257 | usasgaccAfuUfUfGfGfcaucggcus | 1346 | asAfsgccgAfugccaaAfuGfgucuas | 2194 |
| | {invAb} | | usu | |
| D-1258 | asgsaccaUfuUfGfGfCfaucggcucs | 1347 | asGfsagccGfaugccaAfaUfggucus | 2195 |
| | {invAb} | | usu | |
| D-1259 | ususuggcAfuCfGfGfCfuccuguuus | 1348 | asAfsaacaGfgagccgAfuGfccaaas | 2196 |
| | {invAb} | | usu | |
| D-1260 | gsgscaucGfgCfUfCfCfuguuuccas | 1349 | asUfsggaaAfcaggagCfcGfaugccs | 2197 |
| | {invAb} | | usu | |
| D-1261 | uscsggcuCfcUfGfUfUfuccauugcs | 1350 | asGfscaauGfgaaacaGfgAfgccgas | 2198 |
| | {invAb} | | usu | |
| D-1262 | gsgscuccUfgUfUfUfCfcauugccus | 1351 | asAfsggcaAfuggaaaCfaGfgagccs | 2199 |
| | {invAb} | | usu | |
| D-1263 | usasggcaUfuUfUfGfUfaauuggaas | 1352 | usUfsuccaAfuuacaaAfaUfgccuas | 2200 |
| | {invAb} | | usu | |
| D-1264 | asgsgcauUfuUfGfUfAfauuggaaas | 1353 | asUfsuuccAfauuacaAfaAfugccus | 2201 |
| | {invAb} | | usu | |
| D-1265 | asusuuugUfaAfUfUfGfgaaagucas | 1354 | usUfsgacuUfuccaauUfaCfaaaaus | 2202 |
| | {invAb} | | usu | |
| D-1266 | ususuguaAfuUfGfGfAfaagucaags | 1355 | usCfsuugaCfuuuccaAfuUfacaaas | 2203 |
| | {invAb} | | usu | |
| D-1267 | asasuuggAfaAfGfUfCfaagacugcs | 1356 | usGfscaguCfuugacuUfuCfcaauus | 2204 |
| | {invAb} | | usu | |
| D-1268 | gsgsaaagUfcAfAfGfAfcugcaguas | 1357 | asUfsacugCfagucuuGfaCfuuuccs | 2205 |
| | {invAb} | | usu | |
| D-1269 | gsuscaagAfcUfGfCfAfguaugugcs | 1358 | usGfscacaUfacugcaGfuCfuugacs | 2206 |
| | {invAb} | | usu | |
| D-1270 | uscsaagaCfuGfCfAfGfuaugugcas | 1359 | asUfsgcacAfuacugcAfgUfcuugas | 2207 |
| | {invAb} | | usu | |
| D-1271 | ascsacacAfcAfGfUfAfguggagcus | 1360 | asAfsgcucCfacuacuGfuGfugugus | 2208 |
| | {invAb} | | usu | |
| D-1272 | csascacaGfuAfGfUfGfgagcuuucs | 1361 | asGfsaaagCfuccacuAfcUfgugugs | 2209 |
| | {invAb} | | usu | |
| D-1273 | ascsacagUfaGfUfGfGfagcuuuccs | 1362 | asGfsgaaaGfcuccacUfaCfugugus | 2210 |
| | {invAb} | | usu | |
| D- | ascsaguaGfuGfGfAfGfcuuuccuas | 2821 | usUfsaggaAfagcuccAfcUfacugus | 2822 |
| 1273B | {invAb} | | usu | |
| D-1274 | gscsuuucCfuAfAfCfAfcuagcagas | 1363 | asUfscugcUfaguguuAfgGfaaagcs | 2211 |
| | {invAb} | | usu | |
| D-1275 | usasacacUfaGfCfAfGfagauuaaus | 1364 | asAfsuuaaUfcucugcUfaGfuguuas | 2212 |
| | {invAb} | | usu | |
| D-1276 | asascacuAfgCfAfGfAfgauuaaucs | 1365 | usGfsauuaAfucucugCfuAfguguus | 2213 |
| | {invAb} | | usu | |
| D-1277 | ascsacuaGfcAfGfAfGfauuaaucas | 1366 | asUfsgauuAfaucucuGfcUfagugus | 2214 |
| | {invAb} | | usu | |
| D-1278 | csusagcaGfaGfAfUfUfaaucacuas | 1367 | asUfsagugAfuuaaucUfcUfgcuags | 2215 |
| | {invAb} | | usu | |
| D-1279 | asgsagauUfaAfUfCfAfcuacauuas | 1368 | asUfsaaugUfagugauUfaAfucucus | 2216 |
| | {invAb} | | usu | |
| D-1280 | csusacauUfaGfAfCfAfacacucaus | 1369 | asAfsugagUfguugucUfaAfuguags | 2217 |
| | {invAb} | | usu | |
| D-1281 | usascauuAfgAfCfAfAfcacucaucs | 1370 | asGfsaugaGfuguuguCfuAfauguas | 2218 |
| | {invAb} | | usu | |
| D-1282 | csasuuagAfcAfAfCfAfcucaucuas | 1371 | asUfsagauGfaguguuGfuCfuaaugs | 2219 |
| | {invAb} | | usu | |
| D-1283 | gsgsauaaCfuGfAfGfAfaacaagags | 1372 | usCfsucuuGfuuucucAfgUfuauccs | 2220 |
| | {invAb} | | usu | |
| D-1284 | gsasgaccAfuUfCfUfCfugucuaacs | 1373 | asGfsuuagAfcagagaAfuGfgucucs | 2221 |
| | {invAb} | | usu | |
| D- | csusgucuAfaCfUfGfUfgauaaaaas | 1374 | asUfsuuuuAfucacagUfuAfgacags | 2222 |
| 1284B | {invAb} | | usu | |
| D-1285 | uscsaggaCfuUfUfAfUfucuauagas | 1375 | asUfscuauAfgaauaaAfgUfccugas | 2223 |
| | {invAb} | | usu | |
| D-1286 | ascsuuuaUfuCfUfAfUfagagcaaas | 1376 | asUfsuugcUfcuauagAfaUfaaagus | 2224 |
| | {invAb} | | usu | |
| D-1287 | ususauucUfaUfAfGfAfgcaaacuus | 1377 | asAfsaguuUfgcucuaUfaGfaauaas | 2225 |
| | {invAb} | | usu | |
| D-1288 | usasuucuAfuAfGfAfGfcaaacuugs | 1378 | asCfsaaguUfugcucuAfuAfgaauas | 2226 |
| | {invAb} | | usu | |
| D-1289 | ususcuauAfgAfGfCfAfaacuugcus | 1379 | asAfsgcaaGfuuugcuCfuAfuagaas | 2227 |
| | {invAb} | | usu | |
| D-1290 | csusguggAfgGfGfCfCfaugcucucs | 1380 | asGfsagagCfauggccCfuCfcacags | 2228 |
| | {invAb} | | usu | |
| D-1291 | gscsucucCfuUfGfGfAfcccaguuas | 1381 | usUfsaacuGfgguccaAfgGfagagcs | 2229 |
| | {invAb} | | usu | |
| D-1292 | uscsuccuUfgGfAfCfCfcaguuaacs | 1382 | asGfsuuaaCfugggucCfaAfggagas | 2230 |
| | {invAb} | | usu | |
| D-1293 | csusccuuGfgAfCfCfCfaguuaacus | 1383 | asAfsguuaAfcuggguCfcAfaggags | 2231 |
| | {invAb} | | usu | |
| D-1294 | cscsuuggAfcCfCfAfGfuuaacugcs | 1384 | usGfscaguUfaacuggGfuCfcaaggs | 2232 |
| | {invAb} | | usu | |
| D-1295 | csusuggaCfcCfAfGfUfuaacugcas | 1385 | usUfsgcagUfuaacugGfgUfccaags | 2233 |
| | {invAb} | | usu | |
| D-1296 | gsgsacccAfgUfUfAfAfcugcaaacs | 1386 | asGfsuuugCfaguuaaCfuGfgguccs | 2234 |
| | {invAb} | | usu | |
| D-1297 | gsascccaGfuUfAfAfCfugcaaacgs | 1387 | asCfsguuuGfcaguuaAfcUfgggucs | 2235 |
| | {invAb} | | usu | |
| D-1298 | ascsccagUfuAfAfCfUfgcaaacgus | 1388 | asAfscguuUfgcaguuAfaCfugggus | 2236 |
| | {invAb} | | usu | |
| D-1299 | cscscaguUfaAfCfUfGfcaaacgugs | 1389 | asCfsacguUfugcaguUfaAfcugggs | 2237 |
| | {invAb} | | usu | |
| D-1300 | cscsaguuAfaCfUfGfCfaaacgugcs | 1390 | usGfscacgUfuugcagUfuAfacuggs | 2238 |
| | {invAb} | | usu | |
| D-1301 | csasguuaAfcUfGfCfAfaacgugcas | 1391 | asUfsgcacGfuuugcaGfuUfaacugs | 2239 |
| | {invAb} | | usu | |
| D-1302 | ususaacuGfcAfAfAfCfgugcauugs | 1392 | asCfsaaugCfacguuuGfcAfguuaas | 2240 |
| | {invAb} | | usu | |
| D-1303 | csusgcaaAfcGfUfGfCfauuggagcs | 1393 | asGfscuccAfaugcacGfuUfugcags | 2241 |
| | {invAb} | | usu | |
| D-1304 | usgscaaaCfgUfGfCfAfuuggagccs | 1394 | asGfsgcucCfaaugcaCfgUfuugcas | 2242 |
| | {invAb} | | usu | |
| D-1305 | asascgugCfaUfUfGfGfagcccuaus | 1395 | asAfsuaggGfcuccaaUfgCfacguus | 2243 |
| | {invAb} | | usu | |
| D-1306 | ascsgugcAfuUfGfGfAfgcccuauus | 1396 | asAfsauagGfgcuccaAfuGfcacgus | 2244 |
| | {invAb} | | usu | |
| D-1307 | gsusgcauUfgGfAfGfCfccuauuugs | 1397 | asCfsaaauAfgggcucCfaAfugcacs | 2245 |
| | {invAb} | | usu | |
| D-1308 | usgscauuGfgAfGfCfCfcuauuugcs | 1398 | asGfscaaaUfagggcuCfcAfaugcas | 2246 |
| | {invAb} | | usu | |
| D-1309 | usgsgagcCfcUfAfUfUfugcugccgs | 1399 | asCfsggcaGfcaaauaGfgGfcuccas | 2247 |
| | {invAb} | | usu | |
| D-1310 | gsgsagccCfuAfUfUfUfgcugccgcs | 1400 | asGfscggcAfgcaaauAfgGfgcuccs | 2248 |
| | {invAb} | | usu | |
| D-1311 | gsasgcccUfaUfUfUfGfcugccgcus | 1401 | asAfsgcggCfagcaaaUfaGfggcucs | 2249 |
| | {invAb} | | usu | |
| D-1312 | asgscccuAfuUfUfGfCfugccgcugs | 1402 | asCfsagcgGfcagcaaAfuAfgggcus | 2250 |
| | {invAb} | | usu | |
| D-1313 | cscsgcugCfcAfUfUfCfuagugaccs | 1403 | asGfsgucaCfuagaauGfgCfagcggs | 2251 |
| | {invAb} | | usu | |
| D-1314 | usgsccauUfcUfAfGfUfgaccuuucs | 1404 | asGfsaaagGfucacuaGfaAfuggcas | 2252 |
| | {invAb} | | usu | |
| D-1315 | gscscauuCfuAfGfUfGfaccuuuccs | 1405 | usGfsgaaaGfgucacuAfgAfauggcs | 2253 |
| | {invAb} | | usu | |
| D-1316 | csusagugAfcCfUfUfUfccacagags | 1406 | asCfsucugUfggaaagGfuCfacuags | 2254 |
| | {invAb} | | usu | |
| D-1317 | asgsagcuGfcGfCfCfUfuccucacgs | 1407 | asCfsgugaGfgaaggcGfcAfgcucus | 2255 |
| | {invAb} | | usu | |
| D-1318 | gscsgccuUfcCfUfCfAfcgugugugs | 1408 | usCfsacacAfcgugagGfaAfggcgcs | 2256 |
| | {invAb} | | usu | |
| D-1319 | cscsucacGfuGfUfGfUfgaaagguus | 1409 | asAfsaccuUfucacacAfcGfugaggs | 2257 |
| | {invAb} | | usu | |
| D-1320 | csuscacgUfgUfGfUfGfaaagguuus | 1410 | asAfsaaccUfuucacaCfaCfgugags | 2258 |
| | {invAb} | | usu | |
| D-1321 | ususcagcCfcUfCfAfGfguagauggs | 1411 | usCfscaucUfaccugaGfgGfcugaas | 2259 |
| | {invAb} | | usu | |
| D-1322 | uscsagccCfuCfAfGfGfuagauggas | 1412 | usUfsccauCfuaccugAfgGfgcugas | 2260 |
| | {invAb} | | usu | |
| D-1323 | asgscccuCfaGfGfUfAfgauggaags | 1413 | asCfsuuccAfucuaccUfgAfgggcus | 2261 |
| | {invAb} | | usu | |
| D- | csascgauGfgCfAfGfUfgcagucaus | 2823 | asAfsugacUfgcacugCfcAfucgugs | 2824 |
| 1323B | {invAb} | | usu | |
| D-1324 | uscsaggaUfgUfUfUfCfuucaggacs | 1414 | asGfsuccuGfaagaaaCfaUfccugas | 2262 |
| | {invAb} | | usu | |
| D-1325 | ususccucAfgCfUfGfAfcaaggaaus | 1415 | asAfsuuccUfugucagCfuGfaggaas | 2263 |
| | {invAb} | | usu | |
| D-1326 | asgscugaCfaAfGfGfAfauuuuggus | 1416 | asAfsccaaAfauuccuUfgUfcagcus | 2264 |
| | {invAb} | | usu | |
| D-1327 | gsasauuuUfgGfUfCfCfcugccuags | 1417 | asCfsuaggCfagggacCfaAfaauucs | 2265 |
| | {invAb} | | usu | |
| D-1328 | asasuuuuGfgUfCfCfCfugccuaggs | 1418 | usCfscuagGfcagggaCfcAfaaauus | 2266 |
| | {invAb} | | usu | |
| D- | ususuuggUfcCfCfUfGfccuaggacs | 2825 | asGfsuccuAfggcaggGfaCfcaaaas | 2826 |
| 1328B | {invAb} | | usu | |
| D-1329 | ususugguCfcCfUfGfCfcuaggaccs | 1419 | asGfsguccUfaggcagGfgAfccaaas | 2267 |
| | {invAb} | | usu | |
| D-1330 | csusgccuAfgGfAfCfCfgggucaucs | 1420 | asGfsaugaCfccggucCfuAfggcags | 2268 |
| | {invAb} | | usu | |
| D-1331 | ascsagagAfgAfUfGfGfuaagcagcs | 1421 | asGfscugcUfuaccauCfuCfucugus | 2269 |
| | {invAb} | | usu | |
| D-1332 | gsasgagaUfgGfUfAfAfgcagcugus | 1422 | usAfscagcUfgcuuacCfaUfcucucs | 2270 |
| | {invAb} | | usu | |
| D-1333 | asgsagauGfgUfAfAfGfcagcuguas | 1423 | asUfsacagCfugcuuaCfcAfucucus | 2271 |
| | {invAb} | | usu | |
| D-1334 | gsasgaugGfuAfAfGfCfagcuguaus | 1424 | asAfsuacaGfcugcuuAfcCfaucucs | 2272 |
| | {invAb} | | usu | |
| D-1335 | gsusaagcAfgCfUfGfUfaugaaugcs | 1425 | asGfscauuCfauacagCfuGfcuuacs | 2273 |
| | {invAb} | | usu | |
| D-1336 | asgscagcUfgUfAfUfGfaaugcugas | 1426 | asUfscagcAfuucauaCfaGfcugcus | 2274 |
| | {invAb} | | usu | |
| D-1337 | gsasuuuuAfaAfAfCfCfaggucaugs | 1427 | asCfsaugaCfcugguuUfuAfaaaucs | 2275 |
| | {invAb} | | usu | |
| D-1338 | ususuuaaAfaCfCfAfGfgucaugggs | 1428 | usCfsccauGfaccuggUfuUfuaaaas | 2276 |
| | {invAb} | | usu | |
| D-1339 | csusgaacAfcUfGfAfCfugcacuuas | 1429 | asUfsaaguGfcagucaGfuGfuucags | 2277 |
| | {invAb} | | usu | |
| D-1340 | usgsaacaCfuGfAfCfUfgcacuuacs | 1430 | asGfsuaagUfgcagucAfgUfguucas | 2278 |
| | {invAb} | | usu | |
| D-1341 | csascuuaCfcAfGfUfCfugauuuuas | 1431 | asUfsaaaaUfcagacuGfgUfaagugs | 2279 |
| | {invAb} | | usu | |
| D-1342 | ascscaguCfuGfAfUfUfuuaucgucs | 1432 | usGfsacgaUfaaaaucAfgAfcuggus | 2280 |
| | {invAb} | | usu | |
| D-1343 | cscsagucUfgAfUfUfUfuaucgucas | 1433 | usUfsgacgAfuaaaauCfaGfacuggs | 2281 |
| | {invAb} | | usu | |
| D-1344 | uscsugauUfuUfAfUfCfgucaaacas | 1434 | asUfsguuuGfacgauaAfaAfucagas | 2282 |
| | {invAb} | | usu | |
| D-1345 | csusgauuUfuAfUfCfGfucaaacacs | 1435 | asGfsuguuUfgacgauAfaAfaucags | 2283 |
| | {invAb} | | usu | |
| D-1346 | usgsauuuUfaUfCfGfUfcaaacaccs | 1436 | usGfsguguUfugacgaUfaAfaaucas | 2284 |
| | {invAb} | | usu | |
| D-1347 | gsasuuuuAfuCfGfUfCfaaacaccas | 1437 | usUfsggugUfuugacgAfuAfaaaucs | 2285 |
| | {invAb} | | usu | |
| D-1348 | asusuuuaUfcGfUfCfAfaacaccaas | 1438 | asUfsugguGfuuugacGfaUfaaaaus | 2286 |
| | {invAb} | | usu | |
| D-1349 | ususaucgUfcAfAfAfCfaccaagccs | 1439 | usGfsgcuuGfguguuuGfaCfgauaas | 2287 |
| | {invAb} | | usu | |
| D-1350 | usasucguCfaAfAfCfAfccaagccas | 1440 | asUfsggcuUfgguguuUfgAfcgauas | 2288 |
| | {invAb} | | usu | |
| D-1351 | csasugcuCfaUfGfGfCfaaucuguus | 1441 | asAfsacagAfuugccaUfgAfgcaugs | 2289 |
| | {invAb} | | usu | |
| D-1352 | uscsauggCfaAfUfCfUfguuuggggs | 1442 | asCfscccaAfacagauUfgCfcaugas | 2290 |
| | {invAb} | | usu | |
| D-1353 | gsusuuugUfuGfUfGfGfcacuagccs | 1443 | usGfsgcuaGfugccacAfaCfaaaacs | 2291 |
| | {invAb} | | usu | |
| D-1354 | ususuuguUfgUfGfGfCfacuagccas | 1444 | usUfsggcuAfgugccaCfaAfcaaaas | 2292 |
| | {invAb} | | usu | |
| D-1355 | ususuguuGfuGfGfCfAfcuagccaas | 1445 | usUfsuggcUfagugccAfcAfacaaas | 2293 |
| | {invAb} | | usu | |
| D-1356 | ususguugUfgGfCfAfCfuagccaaas | 1446 | asUfsuuggCfuagugcCfaCfaacaas | 2294 |
| | {invAb} | | usu | |
| D-1357 | gsusugugGfcAfCfUfAfgccaaacas | 1447 | asUfsguuuGfgcuaguGfcCfacaacs | 2295 |
| | {invAb} | | usu | |
| D-1358 | ususguggCfaCfUfAfGfccaaacaus | 1448 | usAfsuguuUfggcuagUfgCfcacaas | 2296 |
| | {invAb} | | usu | |
| D-1359 | usgsuggcAfcUfAfGfCfcaaacauas | 1449 | usUfsauguUfuggcuaGfuGfccacas | 2297 |
| | {invAb} | | usu | |
| D-1360 | gsusggcaCfuAfGfCfCfaaacauaas | 1450 | usUfsuaugUfuuggcuAfgUfgccacs | 2298 |
| | {invAb} | | usu | |
| D-1361 | usgsgcacUfaGfCfCfAfaacauaaas | 1451 | asUfsuuauGfuuuggcUfaGfugccas | 2299 |
| | {invAb} | | usu | |
| D-1362 | gsgscacuAfgCfCfAfAfacauaaags | 1452 | asCfsuuuaUfguuuggCfuAfgugccs | 2300 |
| | {invAb} | | usu | |
| D-1363 | gscsacuaGfcCfAfAfAfcauaaaggs | 1453 | asCfscuuuAfuguuugGfcUfagugcs | 2301 |
| | {invAb} | | usu | |
| D-1364 | asgsccaaAfcAfUfAfAfaggggcuus | 1454 | usAfsagccCfcuuuauGfuUfuggcus | 2302 |
| | {invAb} | | usu | |
| D-1365 | gscscaaaCfaUfAfAfAfggggcuuas | 1455 | usUfsaagcCfccuuuaUfgUfuuggcs | 2303 |
| | {invAb} | | usu | |
| D-1366 | cscsaaacAfuAfAfAfGfgggcuuaas | 1456 | asUfsuaagCfcccuuuAfuGfuuuggs | 2304 |
| | {invAb} | | usu | |
| D-1367 | csasaacaUfaAfAfGfGfggcuuaags | 1457 | asCfsuuaaGfccccuuUfaUfguuugs | 2305 |
| | {invAb} | | usu | |
| D-1368 | asasacauAfaAfGfGfGfgcuuaagus | 1458 | asAfscuuaAfgccccuUfuAfuguuus | 2306 |
| | {invAb} | | usu | |
| D-1369 | asascauaAfaGfGfGfGfcuuaagucs | 1459 | usGfsacuuAfagccccUfuUfauguus | 2307 |
| | {invAb} | | usu | |
| D-1370 | ascsauaaAfgGfGfGfCfuuaagucas | 1460 | asUfsgacuUfaagcccCfuUfuaugus | 2308 |
| | {invAb} | | usu | |
| D-1371 | asusaaagGfgGfCfUfUfaagucagcs | 1461 | asGfscugaCfuuaagcCfcCfuuuaus | 2309 |
| | {invAb} | | usu | |
| D-1372 | usasaaggGfgCfUfUfAfagucagccs | 1462 | asGfsgcugAfcuuaagCfcCfcuuuas | 2310 |
| | {invAb} | | usu | |
| D-1373 | asgsgggcUfuAfAfGfUfcagccugcs | 1463 | usGfscaggCfugacuuAfaGfccccus | 2311 |
| | {invAb} | | usu | |
| D-1374 | asasgucaGfcCfUfGfCfauacagags | 1464 | asCfsucugUfaugcagGfcUfgacuus | 2312 |
| | {invAb} | | usu | |
| D-1375 | asgsucagCfcUfGfCfAfuacagaggs | 1465 | usCfscucuGfuaugcaGfgCfugacus | 2313 |
| | {invAb} | | usu | |
| D-1376 | asgsccugCfaUfAfCfAfgaggaucgs | 1466 | asCfsgaucCfucuguaUfgCfaggcus | 2314 |
| | {invAb} | | usu | |
| D-1377 | gscscugcAfuAfCfAfGfaggaucggs | 1467 | asCfscgauCfcucuguAfuGfcaggcs | 2315 |
| | {invAb} | | usu | |
| D-1378 | cscsugcaUfaCfAfGfAfggaucgggs | 1468 | asCfsccgaUfccucugUfaUfgcaggs | 2316 |
| | {invAb} | | usu | |
| D-1379 | ascsagagGfaUfCfGfGfggagagaas | 1469 | asUfsucucUfccccgaUfcCfucugus | 2317 |
| | {invAb} | | usu | |
| D-1380 | gsasguacUfuAfCfCfAfgaguuuaas | 1470 | asUfsuaaaCfucugguAfaGfuacucs | 2318 |
| | {invAb} | | usu | |
| D-1381 | csusgcacUfaAfAfAfUfccccaaacs | 1471 | asGfsuuugGfggauuuUfaGfugcags | 2319 |
| | {invAb} | | usu | |
| D-1382 | usgscacuAfaAfAfUfCfcccaaacus | 1472 | asAfsguuuGfgggauuUfuAfgugcas | 2320 |
| | {invAb} | | usu | |
| D-1383 | csascuaaAfaUfCfCfCfcaaacugas | 1473 | asUfscaguUfuggggaUfuUfuagugs | 2321 |
| | {invAb} | | usu | |
| D-1384 | asasucccCfaAfAfCfUfgacagguas | 1474 | usUfsaccuGfucaguuUfgGfggauus | 2322 |
| | {invAb} | | usu | |
| D-1385 | cscsaaacUfgAfCfAfGfguaaaugus | 1475 | usAfscauuUfaccuguCfaGfuuuggs | 2323 |
| | {invAb} | | usu | |
| D-1386 | csasaacuGfaCfAfGfGfuaaauguas | 1476 | asUfsacauUfuaccugUfcAfguuugs | 2324 |
| | {invAb} | | usu | |
| D-1387 | asasacugAfcAfGfGfUfaaauguags | 1477 | asCfsuacaUfuuaccuGfuCfaguuus | 2325 |
| | {invAb} | | usu | |
| D-1388 | ascsugacAfgGfUfAfAfauguagccs | 1478 | asGfsgcuaCfauuuacCfuGfucagus | 2326 |
| | {invAb} | | usu | |
| D-1389 | asuscuaaAfuCfAfCfAfcuauuuucs | 1479 | asGfsaaaaUfagugugAfuUfuagaus | 2327 |
| | {invAb} | | usu | |
| D-1390 | csusaaauCfaCfAfCfUfauuuucgas | 1480 | asUfscgaaAfauagugUfgAfuuuags | 2328 |
| | {invAb} | | usu | |
| D-1391 | usasaaucAfcAfCfUfAfuuuucgags | 1481 | usCfsucgaAfaauaguGfuGfauuuas | 2329 |
| | {invAb} | | usu | |
| D-1392 | asasucacAfcUfAfUfUfuucgagaus | 1482 | asAfsucucGfaaaauaGfuGfugauus | 2330 |
| | {invAb} | | usu | |
| D-1393 | uscsacacUfaUfUfUfUfcgagaucas | 1483 | asUfsgaucUfcgaaaaUfaGfugugas | 2331 |
| | {invAb} | | usu | |
| D-1394 | csascacuAfuUfUfUfCfgagaucaus | 1484 | asAfsugauCfucgaaaAfuAfgugugs | 2332 |
| | {invAb} | | usu | |
| D-1395 | ascsacuaUfuUfUfCfGfagaucaugs | 1485 | asCfsaugaUfcucgaaAfaUfagugus | 2333 |
| | {invAb} | | usu | |
| D-1396 | ascsuauuUfuCfGfAfGfaucauguas | 1486 | asUfsacauGfaucucgAfaAfauagus | 2334 |
| | {invAb} | | usu | |
| D-1397 | csusauuuUfcGfAfGfAfucauguaus | 1487 | usAfsuacaUfgaucucGfaAfaauags | 2335 |
| | {invAb} | | usu | |
| D-1398 | asusuuucGfaGfAfUfCfauguauaas | 1488 | usUfsuauaCfaugaucUfcGfaaaaus | 2336 |
| | {invAb} | | usu | |
| D-1399 | ususcgagAfuCfAfUfGfuauaaaaas | 1489 | asUfsuuuuAfuacaugAfuCfucgaas | 2337 |
| | {invAb} | | usu | |
| D-1400 | asasaaaaGfaAfGfUfCfaugcugugs | 1490 | asCfsacagCfaugacuUfcUfuuuuus | 2338 |
| | {invAb} | | usu | |
| D-1401 | usgscuguGfuGfGfCfCfaauuauaas | 1491 | asUfsuauaAfuuggccAfcAfcagcas | 2339 |
| | {invAb} | | usu | |
| D-1402 | ususggagGfgAfCfCfAfggaaaugus | 1492 | usAfscauuUfccugguCfcCfuccaas | 2340 |
| | {invAb} | | usu | |
| D-1403 | ascscaggAfaAfUfGfUfaagacaccs | 1493 | usGfsguguCfuuacauUfuCfcuggus | 2341 |
| | {invAb} | | usu | |
| D-1404 | cscsaggaAfaUfGfUfAfagacaccas | 1494 | usUfsggugUfcuuacaUfuUfccuggs | 2342 |
| | {invAb} | | usu | |
| D-1405 | gsusgugcCfuGfAfUfGfucaccucas | 1495 | asUfsgaggUfgacaucAfgGfcacacs | 2343 |
| | {invAb} | | usu | |
| D-1406 | usgsugccUfgAfUfGfUfcaccucaus | 1496 | asAfsugagGfugacauCfaGfgcacas | 2344 |
| | {invAb} | | usu | |
| D-1407 | gsusgccuGfaUfGfUfCfaccucaugs | 1497 | usCfsaugaGfgugacaUfcAfggcacs | 2345 |
| | {invAb} | | usu | |
| D-1408 | gscscugaUfgUfCfAfCfcucaugaus | 1498 | asAfsucauGfaggugaCfaUfcaggcs | 2346 |
| | {invAb} | | usu | |
| D-1409 | ususuuuuAfaCfUfCfCfugcgccaas | 1499 | asUfsuggcGfcaggagUfuAfaaaaas | 2347 |
| | {invAb} | | usu | |
| D-1410 | ususaacuCfcUfGfCfGfccaaggacs | 1500 | usGfsuccuUfggcgcaGfgAfguuaas | 2348 |
| | {invAb} | | usu | |
| D-1411 | asascuccUfgCfGfCfCfaaggacags | 1501 | asCfsugucCfuuggcgCfaGfgaguus | 2349 |
| | {invAb} | | usu | |
| D-1412 | ascsuccuGfcGfCfCfAfaggacagus | 1502 | asAfscuguCfcuuggcGfcAfggagus | 2350 |
| | {invAb} | | usu | |
| D-1413 | usgsuccaCfcUfUfUfGfugcuuugcs | 1503 | asGfscaaaGfcacaaaGfgUfggacas | 2351 |
| | {invAb} | | usu | |
| D-1414 | uscscaccUfuUfGfUfGfcuuugcgas | 1504 | asUfscgcaAfagcacaAfaGfguggas | 2352 |
| | {invAb} | | usu | |
| D-1415 | csasccuuUfgUfGfCfUfuugcgaggs | 1505 | asCfscucgCfaaagcaCfaAfaggugs | 2353 |
| | {invAb} | | usu | |
| D-1416 | cscsuuugUfgCfUfUfUfgcgaggccs | 1506 | asGfsgccuCfgcaaagCfaCfaaaggs | 2354 |
| | {invAb} | | usu | |
| D-1416 | cscsuuugUfgCfUfUfUfgcgaggccs | 1507 | asGfsgccuCfgcaaagCfaCfaaaggs | 2355 |
| | {invAb} | | usu | |
| D-1417 | gsasgcccAfgGfCfAfUfcugcucgcs | 1508 | asGfscgagCfagaugcCfuGfggcucs | 2356 |
| | {invAb} | | usu | |
| D-1418 | cscscaggCfaUfCfUfGfcucgccugs | 1509 | asCfsaggcGfagcagaUfgCfcugggs | 2357 |
| | {invAb} | | usu | |
| D-1419 | csasggcaUfcUfGfCfUfcgccugccs | 1510 | usGfsgcagGfcgagcaGfaUfgccugs | 2358 |
| | {invAb} | | usu | |
| D-1420 | gscsaucuGfcUfCfGfCfcugccacgs | 1511 | asCfsguggCfaggcgaGfcAfgaugcs | 2359 |
| | {invAb} | | usu | |
| D-1421 | usgsccacGfgCfUfGfAfccagagaas | 1512 | asUfsucucUfggucagCfcGfuggcas | 2360 |
| | {invAb} | | usu | |
| D-1422 | gsasgcucUfgCfCfUfUfagacgacgs | 1513 | asCfsgucgUfcuaaggCfaGfagcucs | 2361 |
| | {invAb} | | usu | |
| D-1423 | asgscucuGfcCfUfUfAfgacgacgus | 1514 | asAfscgucGfucuaagGfcAfgagcus | 2362 |
| | {invAb} | | usu | |
| D-1424 | gscsucugCfcUfUfAfGfacgacgugs | 1515 | asCfsacguCfgucuaaGfgCfagagcs | 2363 |
| | {invAb} | | usu | |
| D-1425 | csuscugcCfuUfAfGfAfcgacgugus | 1516 | asAfscacgUfcgucuaAfgGfcagags | 2364 |
| | {invAb} | | usu | |
| D-1426 | uscsugccUfuAfGfAfCfgacguguus | 1517 | usAfsacacGfucgucuAfaGfgcagas | 2365 |
| | {invAb} | | usu | |
| D-1427 | csusgccuUfaGfAfCfGfacguguuas | 1518 | asUfsaacaCfgucgucUfaAfggcags | 2366 |
| | {invAb} | | usu | |
| D-1428 | gscscuuaGfaCfGfAfCfguguuacas | 1519 | asUfsguaaCfacgucgUfcUfaaggcs | 2367 |
| | {invAb} | | usu | |
| D-1429 | cscsuuagAfcGfAfCfGfuguuacags | 1520 | asCfsuguaAfcacgucGfuCfuaaggs | 2368 |
| | {invAb} | | usu | |
| D-1430 | csusuagaCfgAfCfGfUfguuacagus | 1521 | usAfscuguAfacacguCfgUfcuaags | 2369 |
| | {invAb} | | usu | |
| D-1431 | usasgacgAfcGfUfGfUfuacaguaus | 1522 | asAfsuacuGfuaacacGfuCfgucuas | 2370 |
| | {invAb} | | usu | |
| D-1432 | ascsgacgUfgUfUfAfCfaguaugaas | 1523 | asUfsucauAfcuguaaCfaCfgucgus | 2371 |
| | {invAb} | | usu | |
| D-1433 | ascsacagCfaGfAfGfGfcacccucgs | 1524 | asCfsgaggGfugccucUfgCfugugus | 2372 |
| | {invAb} | | usu | |
| D-1434 | csascagcAfgAfGfGfCfacccucgus | 1525 | usAfscgagGfgugccuCfuGfcugugs | 2373 |
| | {invAb} | | usu | |
| D-1435 | ascsagcaGfaGfGfCfAfcccucguas | 1526 | asUfsacgaGfggugccUfcUfgcugus | 2374 |
| | {invAb} | | usu | |
| D-1436 | csasgcagAfgGfCfAfCfccucguaus | 1527 | asAfsuacgAfgggugcCfuCfugcugs | 2375 |
| | {invAb} | | usu | |
| D-1437 | asgscagaGfgCfAfCfCfcucguaugs | 1528 | asCfsauacGfagggugCfcUfcugcus | 2376 |
| | {invAb} | | usu | |
| D-1438 | gscsagagGfcAfCfCfCfucguaugus | 1529 | asAfscauaCfgaggguGfcCfucugcs | 2377 |
| | {invAb} | | usu | |
| D-1439 | csasgaggCfaCfCfCfUfcguauguus | 1530 | asAfsacauAfcgagggUfgCfcucugs | 2378 |
| | {invAb} | | usu | |
| D-1440 | asgsaggcAfcCfCfUfCfguauguuus | 1531 | asAfsaacaUfacgaggGfuGfccucus | 2379 |
| | {invAb} | | usu | |
| D-1441 | gsasggcaCfcCfUfCfGfuauguuuus | 1532 | asAfsaaacAfuacgagGfgUfgccucs | 2380 |
| | {invAb} | | usu | |
| D-1442 | gsgscaccCfuCfGfUfAfuguuuugas | 1533 | usUfscaaaAfcauacgAfgGfgugccs | 2381 |
| | {invAb} | | usu | |
| D-1443 | cscscucgUfaUfGfUfUfuugaaagus | 1534 | asAfscuuuCfaaaacaUfaCfgagggs | 2382 |
| | {invAb} | | usu | |
| D-1444 | asusguaaAfaCfUfAfUfacugacccs | 1535 | asGfsggucAfguauagUfuUfuacaus | 2383 |
| | {invAb} | | usu | |
| D-1445 | usgsuaaaAfcUfAfUfAfcugacccgs | 1536 | asCfsggguCfaguauaGfuUfuuacas | 2384 |
| | {invAb} | | usu | |
| D-1446 | gsusaaaaCfuAfUfAfCfugacccgus | 1537 | asAfscgggUfcaguauAfgUfuuuacs | 2385 |
| | {invAb} | | usu | |
| D-1447 | usasaaacUfaUfAfCfUfgacccguus | 1538 | asAfsacggGfucaguaUfaGfuuuuas | 2386 |
| | {invAb} | | usu | |
| D-1448 | ascsuauaCfuGfAfCfCfcguuuucas | 1539 | asUfsgaaaAfcgggucAfgUfauagus | 2387 |
| | {invAb} | | usu | |
| D-1449 | asusacugAfcCfCfGfUfuuucaguus | 1540 | asAfsacugAfaaacggGfuCfaguaus | 2388 |
| | {invAb} | | usu | |
| D-1450 | ususucagUfuUfUfAfAfagggucgus | 1541 | asAfscgacCfcuuuaaAfaCfugaaas | 2389 |
| | {invAb} | | usu | |
| D-1451 | ususcaguUfuUfAfAfAfgggucgugs | 1542 | usCfsacgaCfccuuuaAfaAfcugaas | 2390 |
| | {invAb} | | usu | |
| D-1452 | uscsaguuUfuAfAfAfGfggucgugas | 1543 | asUfscacgAfcccuuuAfaAfacugas | 2391 |
| | {invAb} | | usu | |
| D-1453 | csasguuuUfaAfAfGfGfgucgugags | 1544 | usCfsucacGfacccuuUfaAfaacugs | 2392 |
| | {invAb} | | usu | |
| D-1454 | gsusuuuaAfaGfGfGfUfcgugagaas | 1545 | usUfsucucAfcgacccUfuUfaaaacs | 2393 |
| | {invAb} | | usu | |
| D- | ususuuaaAfgGfGfUfCfgugagaaas | 2827 | asUfsuucuCfacgaccCfuUfuaaaas | 2828 |
| 1454B | {invAb} | | usu | |
| D-1455 | ususuaaaGfgGfUfCfGfugagaaacs | 1546 | asGfsuuucUfcacgacCfcUfuuaaas | 2394 |
| | {invAb} | | usu | |
| D-1456 | usasaaggGfuCfGfUfGfagaaacugs | 1547 | asCfsaguuUfcucacgAfcCfcuuuas | 2395 |
| | {invAb} | | usu | |
| D-1457 | asasagggUfcGfUfGfAfgaaacuggs | 1548 | asCfscaguUfucucacGfaCfccuuus | 2396 |
| | {invAb} | | usu | |
| D-1458 | gsasgaaaCfuGfGfCfUfgguccaaus | 1549 | asAfsuuggAfccagccAfgUfuucucs | 2397 |
| | {invAb} | | usu | |
| D-1459 | usgsguccAfaUfGfGfGfauuuacags | 1550 | asCfsuguaAfaucccaUfuGfgaccas | 2398 |
| | {invAb} | | usu | |
| D-1460 | cscsaaugGfgAfUfUfUfacagcaacs | 1551 | usGfsuugcUfguaaauCfcCfauuggs | 2399 |
| | {invAb} | | usu | |
| D-1461 | ususuaagUfuUfGfCfUfcuuaaucgs | 1552 | asCfsgauuAfagagcaAfaCfuuaaas | 2400 |
| | {invAb} | | usu | |
| D-1462 | ususaaguUfuGfCfUfCfuuaaucgus | 1553 | usAfscgauUfaagagcAfaAfcuuaas | 2401 |
| | {invAb} | | usu | |
| D-1463 | asgsuuugCfuCfUfUfAfaucguaugs | 1554 | asCfsauacGfauuaagAfgCfaaacus | 2402 |
| | {invAb} | | usu | |
| D-1464 | gsusuugcUfcUfUfAfAfucguauggs | 1555 | usCfscauaCfgauuaaGfaGfcaaacs | 2403 |
| | {invAb} | | usu | |
| D-1465 | ususugcuCfuUfAfAfUfcguauggas | 1556 | usUfsccauAfcgauuaAfgAfgcaaas | 2404 |
| | {invAb} | | usu | |
| D-1466 | usgscucuUfaAfUfCfGfuauggaags | 1557 | asCfsuuccAfuacgauUfaAfgagcas | 2405 |
| | {invAb} | | usu | |
| D-1467 | csusuaauCfgUfAfUfGfgaagcuugs | 1558 | usCfsaagcUfuccauaCfgAfuuaags | 2406 |
| | {invAb} | | usu | |
| D-1468 | ususaaucGfuAfUfGfGfaagcuugas | 1559 | asUfscaagCfuuccauAfcGfauuaas | 2407 |
| | {invAb} | | usu | |
| D-1469 | gsgsaagcUfuGfAfGfCfuauguguus | 1560 | asAfsacacAfuagcucAfaGfcuuccs | 2408 |
| | {invAb} | | usu | |
| D-1470 | gsasagcuUfgAfGfCfUfauguguugs | 1561 | asCfsaacaCfauagcuCfaAfgcuucs | 2409 |
| | {invAb} | | usu | |
| D-1471 | asgscuugAfgCfUfAfUfguguuggas | 1562 | usUfsccaaCfacauagCfuCfaagcus | 2410 |
| | {invAb} | | usu | |
| D-1472 | gscsuugaGfcUfAfUfGfuguuggaas | 1563 | asUfsuccaAfcacauaGfcUfcaagcs | 2411 |
| | {invAb} | | usu | |
| D-1473 | csusugagCfuAfUfGfUfguuggaags | 1564 | asCfsuuccAfacacauAfgCfucaags | 2412 |
| | {invAb} | | usu | |
| D-1474 | ususgagcUfaUfGfUfGfuuggaagus | 1565 | asAfscuucCfaacacaUfaGfcucaas | 2413 |
| | {invAb} | | usu | |
| D-1475 | usgsagcuAfuGfUfGfUfuggaagugs | 1566 | asCfsacuuCfcaacacAfuAfgcucas | 2414 |
| | {invAb} | | usu | |
| D-1476 | gsasgcuaUfgUfGfUfUfggaagugcs | 1567 | asGfscacuUfccaacaCfaUfagcucs | 2415 |
| | {invAb} | | usu | |
| D-1477 | gsusguugGfaAfGfUfGfcccugguus | 1568 | asAfsaccaGfggcacuUfcCfaacacs | 2416 |
| | {invAb} | | usu | |
| D-1478 | gsgsaaguGfcCfCfUfGfguuuuaaus | 1569 | asAfsuuaaAfaccaggGfcAfcuuccs | 2417 |
| | {invAb} | | usu | |
| D-1479 | csusgguuUfuAfAfUfCfcauacacas | 1570 | usUfsguguAfuggauuAfaAfaccags | 2418 |
| | {invAb} | | usu | |
| D-1480 | ususaaucCfaUfAfCfAfcaaagacgs | 1571 | asCfsgucuUfuguguaUfgGfauuaas | 2419 |
| | {invAb} | | usu | |
| D-1481 | usasauccAfuAfCfAfCfaaagacggs | 1572 | asCfscgucUfuuguguAfuGfgauuas | 2420 |
| | {invAb} | | usu | |
| D-1482 | asasuccaUfaCfAfCfAfaagacggus | 1573 | usAfsccguCfuuugugUfaUfggauus | 2421 |
| | {invAb} | | usu | |
| D-1483 | asusccauAfcAfCfAfAfagacgguas | 1574 | asUfsaccgUfcuuuguGfuAfuggaus | 2422 |
| | {invAb} | | usu | |
| D-1484 | uscscauaCfaCfAfAfAfgacgguacs | 1575 | usGfsuaccGfucuuugUfgUfauggas | 2423 |
| | {invAb} | | usu | |
| D-1485 | csasuacaCfaAfAfGfAfcgguacaus | 1576 | usAfsuguaCfcgucuuUfgUfguaugs | 2424 |
| | {invAb} | | usu | |
| D-1486 | usascacaAfaGfAfCfGfguacauaas | 1577 | asUfsuaugUfaccgucUfuUfguguas | 2425 |
| | {invAb} | | usu | |
| D-1487 | ascsacaaAfgAfCfGfGfuacauaaus | 1578 | asAfsuuauGfuaccguCfuUfugugus | 2426 |
| | {invAb} | | usu | |
| D-1488 | csascaaaGfaCfGfGfUfacauaaucs | 1579 | asGfsauuaUfguaccgUfcUfuugugs | 2427 |
| | {invAb} | | usu | |
| D-1489 | ascsaaagAfcGfGfUfAfcauaauccs | 1580 | asGfsgauuAfuguaccGfuCfuuugus | 2428 |
| | {invAb} | | usu | |
| D-1490 | csasaagaCfgGfUfAfCfauaauccus | 1581 | usAfsggauUfauguacCfgUfcuuugs | 2429 |
| | {invAb} | | usu | |
| D-1491 | asasagacGfgUfAfCfAfuaauccuas | 1582 | asUfsaggaUfuauguaCfcGfucuuus | 2430 |
| | {invAb} | | usu | |
| D-1492 | asasgacgGfuAfCfAfUfaauccuacs | 1583 | usGfsuaggAfuuauguAfcCfgucuus | 2431 |
| | {invAb} | | usu | |
| D-1493 | gsusacauAfaUfCfCfUfacagguuus | 1584 | usAfsaaccUfguaggaUfuAfuguacs | 2432 |
| | {invAb} | | usu | |
| D-1494 | csasuaauCfcUfAfCfAfgguuuaaas | 1585 | asUfsuuaaAfccuguaGfgAfuuaugs | 2433 |
| | {invAb} | | usu | |
| D-1495 | asusccuaCfaGfGfUfUfuaaauguas | 1586 | asUfsacauUfuaaaccUfgUfaggaus | 2434 |
| | {invAb} | | usu | |
| D-1496 | usasguuuGfgAfAfUfUfcuuugcucs | 1587 | asGfsagcaAfagaauuCfcAfaacuas | 2435 |
| | {invAb} | | usu | |
| D-1497 | asgsuuugGfaAfUfUfCfuuugcucus | 1588 | usAfsgagcAfaagaauUfcCfaaacus | 2436 |
| | {invAb} | | usu | |
| D-1498 | ususuggaAfuUfCfUfUfugcucuacs | 1589 | asGfsuagaGfcaaagaAfuUfccaaas | 2437 |
| | {invAb} | | usu | |
| D-1499 | ususgcucUfaCfUfGfUfuuacauugs | 1590 | asCfsaaugUfaaacagUfaGfagcaas | 2438 |
| | {invAb} | | usu | |
| D-1500 | uscsuacuGfuUfUfAfCfauugcagas | 1591 | asUfscugcAfauguaaAfcAfguagas | 2439 |
| | {invAb} | | usu | |
| D-1501 | usascuguUfuAfCfAfUfugcagauus | 1592 | asAfsaucuGfcaauguAfaAfcaguas | 2440 |
| | {invAb} | | usu | |
| D-1502 | ascsuguuUfaCfAfUfUfgcagauugs | 1593 | asCfsaaucUfgcaaugUfaAfacagus | 2441 |
| | {invAb} | | usu | |
| D-1503 | ususuacaUfuGfCfAfGfauugcuaus | 1594 | usAfsuagcAfaucugcAfaUfguaaas | 2442 |
| | {invAb} | | usu | |
| D-1504 | ususacauUfgCfAfGfAfuugcuauas | 1595 | usUfsauagCfaaucugCfaAfuguaas | 2443 |
| | ( invAb} | | usu | |
| D-1505 | usascauuGfcAfGfAfUfugcuauaas | 1596 | asUfsuauaGfcaaucuGfcAfauguas | 2444 |
| | {invAb} | | usu | |
| D-1506 | asusugcuAfuAfAfUfUfucaaggags | 1597 | asCfsuccuUfgaaauuAfuAfgcaaus | 2445 |
| | {invAb} | | usu | |
| D-1507 | ususgcuaUfaAfUfUfUfcaaggagus | 1598 | asAfscuccUfugaaauUfaUfagcaas | 2446 |
| | {invAb} | | usu | |
| D-1508 | asasugauGfcAfCfUfUfuaggaugus | 1599 | asAfscaucCfuaaaguGfcAfucauus | 2447 |
| | {invAb} | | usu | |
| D-1509 | asusgaugCfaCfUfUfUfaggauguus | 1600 | asAfsacauCfcuaaagUfgCfaucaus | 2448 |
| | {invAb} | | usu | |
| D-1510 | ascsaugaAfuCfAfUfUfcacaugacs | 1601 | asGfsucauGfugaaugAfuUfcaugus | 2449 |
| | {invAb} | | usu | |
| D-1511 | csasugaaUfcAfUfUfCfacaugaccs | 1602 | usGfsgucaUfgugaauGfaUfucaugs | 2450 |
| | {invAb} | | usu | |
| D-1512 | asasauacAfuGfUfCfUfagucugucs | 1603 | asGfsacagAfcuagacAfuGfuauuus | 2451 |
| | {invAb} | | usu | |
| D- | asasuacaUfgUfCfUfAfgucuguccs | 2829 | asGfsgacaGfacuagaCfaUfguauus | 2830 |
| 1512B | {invAb} | | usu | |
| D-1513 | asusgucuAfgUfCfUfGfuccuuuaas | 1604 | asUfsuaaaGfgacagaCfuAfgacaus | 2452 |
| | {invAb} | | usu | |
| D-1514 | usgsucuaGfuCfUfGfUfccuuuaaus | 1605 | usAfsuuaaAfggacagAfcUfagacas | 2453 |
| | {invAb} | | usu | |
| D-1515 | uscsuaguCfuGfUfCfCfuuuaauags | 1606 | asCfsuauuAfaaggacAfgAfcuagas | 2454 |
| | {invAb} | | usu | |
| D-1516 | csusagucUfgUfCfCfUfuuaauagcs | 1607 | asGfscuauUfaaaggaCfaGfacuags | 2455 |
| | {invAb} | | usu | |
| D-1517 | usasgucuGfuCfCfUfUfuaauagcus | 1608 | asAfsgcuaUfuaaaggAfcAfgacuas | 2456 |
| | {invAb} | | usu | |
| D-1518 | gsuscuguCfcUfUfUfAfauagcucus | 1609 | asAfsgagcUfauuaaaGfgAfcagacs | 2457 |
| | {invAb} | | usu | |
| D-1519 | asasucagAfuCfAfUfUfaccaguuas | 1610 | asUfsaacuGfguaaugAfuCfugauus | 2458 |
| | {invAb} | | usu | |
| D-1520 | uscsagauCfaUfUfAfCfcaguuagcs | 1611 | asGfscuaaCfugguaaUfgAfucugas | 2459 |
| | {invAb} | | usu | |
| D-1521 | csasgaucAfuUfAfCfCfaguuagcus | 1612 | asAfsgcuaAfcugguaAfuGfaucugs | 2460 |
| | {invAb} | | usu | |
| D-1522 | asgsaucaUfuAfCfCfAfguuagcuus | 1613 | asAfsagcuAfacugguAfaUfgaucus | 2461 |
| | {invAb} | | usu | |
| D-1523 | uscsauuaCfcAfGfUfUfagcuuuuas | 1614 | usUfsaaaaGfcuaacuGfgUfaaugas | 2462 |
| | {invAb} | | usu | |
| D-1524 | csasuuacCfaGfUfUfAfgcuuuuaas | 1615 | usUfsuaaaAfgcuaacUfgGfuaaugs | 2463 |
| | {invAb} | | usu | |
| D-1525 | ascscaguUfaGfCfUfUfuuaaagcas | 1616 | asUfsgcuuUfaaaagcUfaAfcuggus | 2464 |
| | {invAb} | | usu | |
| D-1526 | asasgcacAfuUfUfGfUfuuaagacus | 1617 | usAfsgucuUfaaacaaAfuGfugcuus | 2465 |
| | {invAb} | | usu | |
| D-1527 | gscsacauUfuGfUfUfUfaagacuaus | 1618 | asAfsuaguCfuuaaacAfaAfugugcs | 2466 |
| | {invAb} | | usu | |
| D-1528 | csusauguUfuUfUfGEGfaaaaauacs | 1619 | asGfsuauuUfuuccaaAfaAfcauags | 2467 |
| | {invAb} | | usu | |
| D-1529 | gsusuuuuGfgAfAfAfAfauacgcuas | 1620 | asUfsagcgUfauuuuuCfcAfaaaacs | 2468 |
| | {invAb} | | usu | |
| D-1530 | ususggaaAfaAfUfAfCfgcuacagas | 1621 | usUfscuguAfgcguauUfuUfuccaas | 2469 |
| | {invAb} | | usu | |
| D-1531 | asasuaaaUfgAfGfAfUfgcuacuaas | 1622 | asUfsuaguAfgcaucuCfaUfuuauus | 2470 |
| | {invAb | | usu | |
| D-1532 | usgsagauGfcUfAfCfUfaauuguuus | 1623 | asAfsaacaAfuuaguaGfcAfucucas | 2471 |
| | {invAb} | | usu | |
| D-1533 | ususuggaAfuCfUfGfUfuguuucugs | 1624 | asCfsagaaAfcaacagAfuUfccaaas | 2472 |
| | {invAb} | | usu | |
| D-1534 | ususcugcCfaAfAfGfGfuaaauuaas | 1625 | asUfsuaauUfuaccuuUfgGfcagaas | 2473 |
| | {invAb} | | usu | |
| D-1535 | uscsugccAfaAfGfGfUfaaauuaacs | 1626 | asGfsuuaaUfuuaccuUfuGfgcagas | 2474 |
| | {invAb} | | usu | |
| D-1536 | gsasuuuaUfuCfAfGfGfaauccccas | 1627 | asUfsggggAfuuccugAfaUfaaaucs | 2475 |
| | {invAb} | | usu | |
| D-1537 | asusucagGfaAfUfCfCfccauuugas | 1628 | usUfscaaaUfggggauUfcCfugaaus | 2476 |
| | {invAb} | | usu | |
| D-1538 | gsgsaaucCfcCfAfUfUfugaauuugs | 1629 | asCfsaaauUfcaaaugGfgGfauuccs | 2477 |
| | {invAb} | | usu | |
| D-1539 | [GalNAc3]scucccaUfuCfUfUfUfc | 1630 | asGfsccucAfugaaagAfaUfgggags | 2478 |
| | augaggcs{invAb} | | usu | |
| D-1540 | [GalNAc3]saaggaaGfaCfCfGfCfa | 1631 | asAfsuaggAfgugcggUfcUfuccuus | 2479 |
| | cuccuaus{invAb} | | usu | |
| D-1541 | [GalNAc3]sgaaaacCfgAfUfUfUfc | 1632 | asGfsugcaCfugaaauCfgGfuuuucs | 2480 |
| | agugcacs{invAb} | | usu | |
| D-1542 | [GalNAc3]sgggagaGfaCfAfAfGfg | 1633 | asAfsuaagUfcccuugUfcUfcucccs | 2481 |
| | gacuuaus{invAb} | | usu | |
| D-1543 | [GalNAc3]sgauguuAfaUfAfAfCfu | 1634 | asCfscuccAfgaguuaUfuAfacaucs | 2482 |
| | cuggaggs{invAb} | | usu | |
| D-1544 | [GalNAc3]scaccaaAfcUfCfCfCfa | 1635 | usGfsaaagAfaugggaGfuUfuggugs | 2483 |
| | uucuuucs{invAb} | | usu | |
| D-1545 | [GalNAc3]sgcaaccGfgAfGfAfAfc | 1636 | usUfscuaaGfaguucuCfcGfguugcs | 2484 |
| | ucuuagas{invAb} | | usu | |
| D-1546 | [GalNAc3]scacaaaGfaCfGfGfUfa | 1637 | asGfsauuaUfguaccgUfcUfuugugs | 2485 |
| | cauaaucs{invAb} | | usu | |
| D-1547 | [GalNAc3]scggaagUfuUfGfAfAfg | 1638 | asAfsaucuAfucuucaAfaCfuuccgs | 2486 |
| | auagauus{invAb} | | usu | |
| D-1548 | [GalNAc3]sacagagAfgAfUfGfGfu | 1639 | asGfscugcUfuaccauCfuCfucugus | 2487 |
| | aagcagcs{invAb} | | usu | |
| D-1549 | [GalNAc3]sccucggUfuCfUfAfCfg | 1640 | asCfscauaAfgcguagAfaCfcgaggs | 2488 |
| | cuuauggs{invAb} | | usu | |
| D-1550 | [GalNAc3]scuccucGfgUfUfCfUfa | 1641 | asAfsuaagCfguagaaCfcGfaggags | 2489 |
| | cgcuuaus{invAb} | | usu | |
| D-1551 | [GalNAc3]sugcaaaCfgUfGfCfAfu | 1642 | asGfsgcucCfaaugcaCfgUfuugcas | 2490 |
| | uggagccs{invAb} | | usu | |
| D-1552 | [GalNAc3]sgaagacCfgCfAfCfUfc | 1643 | asGfsccauAfggagugCfgGfucuucs | 2491 |
| | cuauggcs{invAb} | | usu | |
| D-1553 | [GalNAc3]sgacaagGfgAfCfUfUfa | 1644 | usUfsuguuGfauaaguCfcCfuugucs | 2492 |
| | ucaacaas{invAb} | | usu | |
| D-1554 | [GalNAc3]sucagaaAfuCfCfAfGfu | 1645 | asGfsuuuaGfuacuggAfuUfucugas | 2493 |
| | acuaaacs{invAb} | | usu | |
| D-1555 | [GalNAc3]saaauacCfaUfCfAfAfa | 1646 | asGfscugcAfuuuugaUfgGfuauuus | 2494 |
| | augcagcs{invAb} | | usu | |
| D-1556 | [GalNAc3]saaugacCfuUfGfCfCfa | 1647 | asCfsggaaUfuuggcaAfgGfucauus | 2495 |
| | aauuccgs{invAb} | | usu | |
| D-1557 | [GalNAc3]scccaauGfgAfUfGfAfu | 1648 | asGfsuauuUfuaucauCfcAfuugggs | 2496 |
| | aaaauacs{invAb} | | usu | |
| D-1558 | [GalNAc3]sagacgaUfaGfCfAfAfu | 1649 | asGfscuucAfcauugcUfaUfcgucus | 2497 |
| | gugaagcs{invAb} | | usu | |
| D-1559 | [GalNAc3]sgaagacGfaUfAfGfCfa | 1650 | asUfsucacAfuugcuaUfcGfucuucs | 2498 |
| | augugaas{invAb} | | usu | |
| D-1560 | [GalNAc3]sucagaaGfaCfGfAfUfa | 1651 | asAfscauuGfcuaucgUfcUfucugas | 2499 |
| | gcaaugus{invAb} | | usu | |
| D-1561 | [GalNAc3]sgggucaGfaAfGfAfCfg | 1652 | asUfsugcuAfucgucuUfcUfgacccs | 2500 |
| | auagcaas{invAb} | | usu | |
| D-1562 | [GalNAc3]saaagacGfgUfAfCfAfu | 1653 | asUfsaggaUfuauguaCfcGfucuuus | 2501 |
| | aauccuas{invAb} | | usu | |
| D-1563 | [GalNAc3]sugucucCfgAfAfGfUfg | 1654 | asAfscuggGfgcacuuCfgGfagacas | 2502 |
| | ccccagus{invAb} | | usu | |
| D-1564 | [GalNAc3]suaguuuGfgAfAfUfUfc | 1655 | asGfsagcaAfagaauuCfcAfaacuas | 2503 |
| | uuugcucs{invAb} | | usu | |
| D-1565 | [GalNAc3]sccaaacUfcCfCfAfUfu | 1656 | asAfsugaaAfgaauggGfaGfuuuggs | 2504 |
| | cuuucaus{invAb} | | usu | |
| D-1566 | [GalNAc3]sguacauAfaUfCfCfUfa | 1657 | usAfsaaccUfguaggaUfuAfuguacs | 2505 |
| | cagguuus{invAb} | | usu | |
| D-1567 | [GalNAc3]scaugcuCfuCfUfCfCfu | 1658 | usAfsgaacCfgaggagAfgAfgcaugs | 2506 |
| | cgguucus{invAb} | | usu | |
| D-1568 | [GalNAc3]saccccaUfgCfUfCfUfc | 1659 | asCfscgagGfagagagCfaUfggggus | 2507 |
| | uccucggs{invAb} | | usu | |
| D-1569 | [GalNAc3]sccgaucAfgCfUfGfUfa | 1660 | usGfsuuguUfcuacagCfuGfaucggs | 2508 |
| | gaacaacs{invAb} | | usu | |
| D-1570 | [GalNAc3]saaccggAfgAfAfCfUfc | 1661 | asUfsuucuAfagaguuCfuCfcgguus | 2509 |
| | uuagaaas{invAb} | | usu | |
| D-1571 | [GalNAc3]sacacagUfaGfUfGfGfa | 1662 | asGfsgaaaGfcuccacUfaCfugugus | 2510 |
| | gcuuuccs{invAb} | | usu | |
| D-1572 | [GalNAc3]saaauacAfuGfUfCfUfa | 1663 | asGfsacagAfcuagacAfuGfuauuus | 2511 |
| | gucugucs{invAb} | | usu | |
| D-1573 | [GalNAc3]sauccggAfaGfUfUfUfg | 1664 | usCfsuaucUfucaaacUfuCfcggaus | 2512 |
| | aagauags{invAb} | | usu | |
| D-1574 | [GalNAc3]sgcaagcCfuAfAfAfCfg | 1665 | asUfsuucuGfacguuuAfgGfcuugcs | 2513 |
| | ucagaaas{invAb} | | usu | |
| D-1575 | [GalNAc3]suugaauAfcUfCfAfGfg | 1666 | usUfscgacUfuccugaGfuAfuucaas | 2514 |
| | aagucgas{invAb} | | usu | |
| D-1576 | [GalNAc3]sguucaaCfcAfCfCfUfu | 1667 | asAfsaucaUfcaagguGfgUfugaacs | 2515 |
| | gaugauus{invAb} | | usu | |
| D-1577 | [GalNAc3]suacuguUfuAfCfAfUfu | 1668 | asAfsaucuGfcaauguAfaAfcaguas | 2516 |
| | gcagauus{invAb} | | usu | |
| D-1578 | [GalNAc3]saccuugCfcAfAfAfUfu | 1669 | asUfscuccGfgaauuuGfgCfaaggus | 2517 |
| | ccggagas{invAb} | | usu | |
| D-1579 | [GalNAc3]scaauggAfuGfAfUfAfa | 1670 | asUfsgguaUfuuuaucAfuCfcauugs | 2518 |
| | aauaccas{invAb} | | usu | |
| D-1580 | [GalNAc3]sggcuccUfgUfUfUfCfc | 1671 | asAfsggcaAfuggaaaCfaGfgagccs | 2519 |
| | auugccus{invAb} | | usu | |
| D-1581 | [GalNAc3]sgaccagAfuUfGfCfUfa | 1672 | usUfsucucAfuuagcaAfuCfuggucs | 2520 |
| | augagaas{invAb} | | usu | |
| D-1582 | [GalNAc3]saggcauUfuUfGfUfAfa | 1673 | asUfsuuccAfauuacaAfaAfugccus | 2521 |
| | uuggaaas{invAb} | | usu | |
| D-1583 | [GalNAc3]suaggcaUfuUfUfGfUfa | 1674 | usUfsuccaAfuuacaaAfaUfgccuas | 2522 |
| | auuggaas{invAb} | | usu | |
| D-1584 | [GalNAc3]sgauuccAfaGfUfCfCfa | 1675 | asCfscucaCfauggacUfuGfgaaucs | 2523 |
| | ugugaggs{invAb} | | usu | |
| D-1585 | [GalNAc3]sccgcacUfcCfUfAfUfg | 1676 | usCfsuucaGfccauagGfaGfugcggs | 2524 |
| | gcugaags{invAb} | | usu | |
| D-1586 | [GalNAc3]scuucggGfaUfUfUfUfg | 1677 | asUfsugucUfucaaaaUfcCfcgaags | 2525 |
| | aagacaas{invAb} | | usu | |
| D-1587 | [GalNAc3]suuugagAfgCfCfCfCfa | 1678 | asUfsucauUfguggggCfuCfucaaas | 2526 |
| | caaugaas{invAb} | | usu | |
| D-1588 | [GalNAc3]saaccgaUfuUfCfAfGfu | 1679 | asAfsucguGfcacugaAfaUfcgguus | 2527 |
| | gcacgaus{invAb} | | usu | |
| D-1589 | [GalNAc3]sacaaggGfaCfUfUfAfu | 1680 | asUfsuuguUfgauaagUfcCfcuugus | 2528 |
| | caacaaas{invAb} | | usu | |
| D-1590 | [GalNAc3]sguaaaaCfuAfUfAfCfu | 1681 | asAfscgggUfcaguauAfgUfuuuacs | 2529 |
| | gacccgus{invAb} | | usu | |
| D-1591 | [GalNAc3]sucuacuGfuUfUfAfCfa | 1682 | asUfscugcAfauguaaAfcAfguagas | 2530 |
| | uugcagas{invAb} | | usu | |
| D-1592 | [GalNAc3]sguuuugGfuUfCfCfCfa | 1683 | usCfsucaaGfuugggaAfcCfaaaacs | 2531 |
| | acuugags{invAb} | | usu | |
| D-1593 | [GalNAc3]suugagcUfaUfGfUfGfu | 1684 | asAfscuucCfaacacaUfaGfcucaas | 2532 |
| | uggaagus{invAb} | | usu | |
| D-1594 | [GalNAc3]suuaaguUfuGfCfUfCfu | 1685 | usAfscgauUfaagagcAfaAfcuuaas | 2533 |
| | uaaucgus{invAb} | | usu | |
| D-1595 | [GalNAc3]sugaccuUfgCfCfAfAfa | 1686 | asUfsccggAfauuuggCfaAfggucas | 2534 |
| | uuccggas{invAb} | | usu | |
| D-1596 | [GalNAc3]suuuaagUfuUfGfCfUfc | 1687 | asCfsgauuAfagagcaAfaCfuuaaas | 2535 |
| | uuaaucgs{invAb} | | usu | |
| D-1597 | [GalNAc3]saccaucCfgAfUfCfAfg | 1688 | usUfscuacAfgcugauCfgGfauggus | 2536 |
| | cuguagas{invAb} | | usu | |
| D-1598 | [GalNAc3]sacaaauGfaCfCfUfUfg | 1689 | asAfsauuuGfgcaaggUfcAfuuugus | 2537 |
| | ccaaauus{invAb} | | usu | |
| D-1599 | [GalNAc3]saaagaaCfcAfUfCfCfg | 1690 | asAfsgcugAfucggauGfgUfucuuus | 2538 |
| | aucagcus{invAb} | | usu | |
| D-1600 | [GalNAc3]scugauuUfuAfUfCfGfu | 1691 | asGfsuguuUfgacgauAfaAfaucags | 2539 |
| | caaacacs{invAb} | | usu | |
| D-1601 | [GalNAc3]sucucucCfuCfGfGfUfu | 1692 | asAfsgcguAfgaaccgAfgGfagagas | 2540 |
| | cuacgcus{invAb} | | usu | |
| D-1602 | [GalNAc3]saguuugAfaGfAfUfAfg | 1693 | asUfsucgaAfucuaucUfuCfaaacus | 2541 |
| | auucgaas{invAb} | | usu | |
| D-1603 | [GalNAc3]suuuacaUfuGfCfAfGfa | 1694 | usAfsuagcAfaucugcAfaUfguaaas | 2542 |
| | uugcuaus{invAb} | | usu | |
| D-1604 | [GalNAc3]sauggucAfcUfCfUfGfa | 1695 | asUfscgguUfuucagaGfuGfaccaus | 2543 |
| | aaaccgas{invAb} | | usu | |
| D-1605 | [GalNAc3]sucucaaUfuCfCfAfCfa | 1696 | usGfsagauCfguguggAfaUfugagas | 2544 |
| | cgaucucs{invAb} | | usu | |
| D-1606 | [GalNAc3]succacaCfgAfUfCfUfc | 1697 | usCfsucucAfugagauCfgUfguggas | 2545 |
| | augagags{invAb} | | usu | |
| D-1607 | [GalNAc3]sgacaauCfaGfGfAfCfg | 1698 | asAfscaagAfccguccUfgAfuugucs | 2546 |
| | gucuugus{invAb} | | usu | |
| D-1608 | [GalNAc3]saagagcCfuAfUfCfCfc | 1699 | asGfsaaagCfagggauAfgGfcucuus | 2547 |
| | ugcuuucs{invAb} | | usu | |
| D-1609 | [GalNAc3]sucaggaCfgGfUfCfUfu | 1700 | asUfsauucAfcaagacCfgUfccugas | 2548 |
| | gugaauas{invAb} | | usu | |
| D-1610 | [GalNAc3]sgucagaAfaUfCfCfAfg | 1701 | asUfsuuagUfacuggaUfuUfcugacs | 2549 |
| | uacuaaas{invAb} | | usu | |
| D-1611 | [GalNAc3]saguuugGfaAfUfUfCfu | 1702 | usAfsgagcAfaagaauUfcCfaaacus | 2550 |
| | uugcucus{invAb} | | usu | |
| D-1612 | [GalNAc3]suuuggaAfuUfCfUfUfu | 1703 | asGfsuagaGfcaaagaAfuUfccaaas | 2551 |
| | gcucuacs{invAb} | | usu | |
| D-1613 | [GalNAc3]scugaaaUfgGfAfCfAfa | 1704 | asAfsggucAfuuugucCfaUfuucags | 2552 |
| | augaccus{invAb} | | usu | |
| D-1614 | [GalNAc3]saagacgGfuAfCfAfUfa | 1705 | usGfsuaggAfuuauguAfcCfgucuus | 2553 |
| | auccuacs{invAb} | | usu | |
| D-1615 | [GalNAc3]sggucuuGfuGfAfAfUfa | 1706 | asCfsuuucCfauauucAfcAfagaccs | 2554 |
| | uggaaags{invAb} | | usu | |
| D-1616 | [GalNAc3]suucaacCfaCfCfUfUfg | 1707 | asCfsaaucAfucaaggUfgGfuugaas | 2555 |
| | augauugs{invAb} | | usu | |
| D-1617 | [GalNAc3]sacuuuaUfuCfUfAfUfa | 1708 | asUfsuugcUfcuauagAfaUfaaagus | 2556 |
| | gagcaaas{invAb} | | usu | |
| D-1618 | [GalNAc3]sagaccgCfaCfUfCfCfu | 1709 | usCfsagccAfuaggagUfgCfggucus | 2557 |
| | auggcugs{invAb} | | usu | |
| D-1619 | [GalNAc3]suauuucCfcCfAfAfUfg | 1710 | usUfsaucaUfccauugGfgGfaaauas | 2558 |
| | gaugauas{invAb} | | usu | |
| D-1620 | [GalNAc3]sgucagaAfgAfCfGfAfu | 1711 | asCfsauugCfuaucguCfuUfcugacs | 2559 |
| | agcaaugs{invAb} | | usu | |
| D-1621 | [GalNAc3]sgcuaauGfaGfAfAfAfg | 1712 | asAfsgagcCfacuuucUfcAfuuagcs | 2560 |
| | uggcucus{invAb} | | usu | |
| D-1622 | [GalNAc3]scauuacCfaGfUfUfAfg | 1713 | usUfsuaaaAfgcuaacUfgGfuaaugs | 2561 |
| | cuuuuaas{invAb} | | usu | |
| D-1623 | [GalNAc3]suugcuaUfaAfUfUfUfc | 1714 | asAfscuccUfugaaauUfaUfagcaas | 2562 |
| | aaggagus{invAb} | | usu | |
| D-1624 | [GalNAc3]sucuacuGfuUfUfAfCfa | 1715 | asUfscugcAfauguaaAfcAfguagas | 2563 |
| | uugcagas{invAb} | | usu | |
| D-1625 | [GalNAc3]saauaaaUfgAfGfAfUfg | 1716 | asUfsuaguAfgcaucuCfaUfuuauus | 2564 |
| | cuacuaas{invAb} | | usu | |
| D-1626 | [GalNAc3]suuauucUfaUfAfGfAfg | 1717 | asAfsaguuUfgcucuaUfaGfaauaas | 2565 |
| | caaacuus{invAb} | | usu | |
| D-1627 | [GalNAc3]saugaugCfaCfUfUfUfa | 1718 | asAfsacauCfcuaaagUfgCfaucaus | 2566 |
| | ggauguus{invAb} | | usu | |
| D-1628 | [GalNAc3]suacauuGfcAfGfAfUfu | 1719 | asUfsuauaGfcaaucuGfcAfauguas | 2567 |
| | gcuauaas{invAb} | | usu | |
| D-1629 | [GalNAc3]suuacauUfgCfAfGfAfu | 1720 | usUfsauagCfaaucugCfaAfuguaas | 2568 |
| | ugcuauas{invAb} | | usu | |
| D-1630 | [GalNAc3]sguuuuaAfaGfGfGfUfc | 1721 | usUfsucucAfcgacccUfuUfaaaacs | 2569 |
| | gugagaas{invAb} | | usu | |
| D-1631 | [GalNAc3]sugagcuAfuGfUfGfUfu | 1722 | asCfsacuuCfcaacacAfuAfgcucas | 2570 |
| | ggaagugs{invAb} | | usu | |
| D-1632 | [GalNAc3]suuuggcAfuCfGfGfCfu | 1723 | asAfsaacaGfgagccgAfuGfccaaas | 2571 |
| | ccuguuus{invAb} | | usu | |
| D-1633 | [GalNAc3]sauccuaCfaGfGfUfUfu | 1724 | asUfsacauUfuaaaccUfgUfaggaus | 2572 |
| | aaauguas{invAb} | | usu | |
| D-1634 | [GalNAc3]suacacaAfaGfAfCfGfg | 1725 | asUfsuaugUfaccgucUfuUfguguas | 2573 |
| | uacauaas{invAb} | | usu | |
| D-1635 | [DCA- | 1726 | usUfscuaaGfaguucuCfcGfguugcs | 2574 |
| | C6]gcaaccGfgAfGfAfAfcucuuaga | | usu | |
| | s{invAb} | | | |
| D-1636 | [DCA- | 1727 | usGfsaaagAfaugggaGfuUfuggugs | 2575 |
| | C6]caccaaAfcUfCfCfCfauucuuuc | | usu | |
| | s{invAb} | | | |
| D-1637 | [DCA- | 1728 | asUfsugucUfucaaaaUfcCfcgaags | 2576 |
| | C6]cuucggGfaUfUfUfUfgaagacaa | | usu | |
| | s{invAb} | | | |
| D-1638 | [DCA- | 1729 | usCfsuaucUfucaaacUfuCfcggaus | 2577 |
| | C6]auccggAfaGfUfUfUfgaagauag | | usu | |
| | s{invAb} | | | |
| D-1639 | [DCA- | 1730 | usUfscuaaGfaguucuCfcGfguusus | 2578 |
| | C6]aaccGfgAfGfAfAfcucuuagaas | | u | |
| | us{invAb} | | | |
| D-1640 | [GalNAc3]saaccGfgAfGfAfAfcuc | 1731 | usUfscuaaGfaguucuCfcGfguusus | 2579 |
| | uuagaasus{invAb} | | u | |
| D-1641 | [DCA- | 1732 | asAfsugaaAfgaauggGfaGfuuuggs | 2580 |
| | C6]ccaaacUfcCfCfAfUfucuuucau | | usu | |
| | s{invAb} | | | |
| D-1642 | [DCA- | 1733 | asGfsuauuUfuaucauCfcAfuugggs | 2581 |
| | C6]cccaauGfgAfUfGfAfuaaaauac | | usu | |
| | s{invAb} | | | |
| D-1643 | [DCA- | 1734 | asCfscauaAfgcguagAfaCfcgaggs | 2582 |
| | C6]ccucggUfuCfUfAfCfgcuuaugg | | usu | |
| | s{invAb} | | | |
| D-1644 | [DCA- | 1735 | usCfsuaucUfucaaacUfuCfcggsus | 2583 |
| | C6]ccggAfaGfUfUfUfgaagauagas | | u | |
| | us{invAb} | | | |
| D-1645 | [GalNAc3]sccggAfaGfUfUfUfgaa | 1736 | usCfsuaucUfucaaacUfuCfcggsus | 2584 |
| | gauagasus{invAb} | | u | |
| D-1646 | [GalNAc3]saaccggAfgAfAfCfUfc | 1737 | usUfscuaaGfaguuCfuCfcGfguusu | 2585 |
| | uuagaaus{invAb} | | su | |
| D-1647 | [GalNAc3]sucggUfuCfUfAfCfgcu | 1738 | asCfscauaAfgcguagAfaCfcgasus | 2586 |
| | uauggusus{invAb} | | u | |
| D-1648 | [GalNAc3]sccaaAfcUfCfCfCfauu | 1739 | usGfsaaagAfaugggaGfuUfuggsus | 2587 |
| | cuuucasus{invAb} | | u | |
| D-1649 | [GalNAc3]sucggGfaUfUfUfUfgaa | 1740 | asUfsugucUfucaaaaUfcCfcgasus | 2588 |
| | gacaausus{invAb} | | u | |
| D-1650 | [GalNAc3]scaauGfgAfUfGfAfuaa | 1741 | asGfsuauuUfuaucauCfcAfuugsus | 2589 |
| | aauacusus{invAb} | | u | |
| D-1651 | [GalNAc3]sucggUfuCfUfAfCfgcu | 1742 | asCfscauaAfgcguAfgAfaCfcgasu | 2590 |
| | uauggusus{invAb} | | su | |
| D-1652 | [GalNAc3]saaccGfgAfGfAfAfcuc | 1743 | usUfscuaaGfaguuCfuCfcGfguusu | 2591 |
| | uuagaasus{invAb} | | su | |
| D-1653 | [GalNAc3]sccaaAfcUfCfCfCfauu | 1744 | usGfsaaagAfauggGfaGfuUfuggsu | 2592 |
| | cuuucasus{invAb} | | su | |
| D-1654 | [GalNAc3]sucggGfaUfUfUfUfgaa | 1745 | asUfsugucUfucaaAfaUfcCfcgasu | 2593 |
| | gacaausus{invAb} | | su | |
| D-1655 | [GalNAc3]scaauGfgAfUfGfAfuaa | 1746 | asGfsuauuUfuaucAfuCfcAfuugsu | 2594 |
| | aauacusus{invAb} | | su | |
| D-1656 | [GalNAc3]sccucggUfuCfUfAfCfg | 1747 | asCfscauAfAfgcguagAfaCfcgagg | 2595 |
| | cuuauggs{invAb} | | susu | |
| D-1657 | [GalNAc3]sgcaaccGfgAfGfAfAfc | 1748 | usUfscuaAfGfaguucuCfcGfguugc | 2596 |
| | ucuuagas{invAb} | | susu | |
| D-1658 | [GalNAc3]scaccaaAfcUfCfCfCfa | 1749 | usGfsaaaGfAfaugggaGfuUfuggug | 2597 |
| | uucuuucs{invAb} | | susu | |
| D-1659 | [GalNAc3]scuucggGfaUfUfUfUfg | 1750 | asUfsuguCfUfucaaaaUfcCfcgaag | 2598 |
| | aagacaas{invAb} | | susu | |
| D-1660 | [GalNAc3]scccaauGfgAfUfGfAfu | 1751 | asGfsuauUfUfuaucauCfcAfuuggg | 2599 |
| | aaaauacs{invAb} | | susu | |
| D-1661 | [GalNAc3]sccucggUfuCfUfAfCfg | 1752 | asCfscauaAfgcguAfgAfaCfcgagg | 2600 |
| | cuuauggs{invAb} | | susu | |
| D-1662 | [GalNAc3]sgcaaccGfgAfGfAfAfc | 1753 | usUfscuaaGfaguuCfuCfcGfguugc | 2601 |
| | ucuuagas{invAb} | | susu | |
| D-1663 | [GalNAc3]scaccaaAfcUfCfCfCfa | 1754 | usGfsaaagAfauggGfaGfuUfuggug | 2602 |
| | uucuuucs{invAb} | | susu | |
| D-1664 | [GalNAc3]scuucggGfaUfUfUfUfg | 1755 | asUfsugucUfucaaAfaUfcCfcgaag | 2603 |
| | aagacaas{invAb} | | susu | |
| D-1665 | [GalNAc3]scccaauGfgAfUfGfAfu | 1756 | asGfsuauuUfuaucAfuCfcAfuuggg | 2604 |
| | aaaauacs{invAb} | | susu | |
| D-1666 | [GalNAc3]sccucggUfuCfUfAfCfg | 1757 | asCfscauaagcguAfgAfaCfcgaggs | 2605 |
| | cuuauggs{invAb} | | usu | |
| D-1667 | [GalNAc3]sgcaaccGfgAfGfAfAfc | 1758 | usUfscuaagaguuCfuCfcGfguugcs | 2606 |
| | ucuuagas{invAb} | | usu | |
| D-1668 | [GalNAc3]scaccaaAfcUfCfCfCfa | 1759 | usGfsaaagaauggGfaGfuUfuggugs | 2607 |
| | uucuuucs{invAb} | | usu | |
| D-1669 | [GalNAc3]scuucggGfaUfUfUfUfg | 1760 | asUfsugucuucaaAfaUfcCfcgaags | 2608 |
| | aagacaas{invAb} | | usu | |
| D-1670 | [DCA- | 1761 | usUfscuaaGfaguuCfuCfcGfguusu | 2609 |
| | C6]aaccggAfgAfAfCfUfcuuagaau | | su | |
| | s{invAb} | | | |
| D-1671 | [DCA- | 1762 | asCfscauaAfgcguagAfaCfcgasus | 2610 |
| | C6]ucggUfuCfUfAfCfgcuuauggus | | u | |
| | us{invAb} | | | |
| D-1672 | [DCA- | 1763 | usGfsaaagAfaugggaGfuUfuggsus | 2611 |
| | C6]ccaaAfcUfCfCfCfauucuuucas | | u | |
| | us{invAb} | | | |
| D-1673 | [DCA- | 1764 | asUfsugucUfucaaaaUfcCfcgasus | 2612 |
| | C6]ucggGfaUfUfUfUfgaagacaaus | | u | |
| | us{invAb} | | | |
| D-1674 | [DCA- | 1765 | asGfsuauuUfuaucauCfcAfuugsus | 2613 |
| | C6]caauGfgAfUfGfAfuaaaauacus | | u | |
| | us{invAb} | | | |
| D-1675 | [DCA- | 1766 | asCfscauaAfgcguAfgAfaCfcgasu | 2614 |
| | C6]ucggUfuCfUfAfCfgcuuauggus | | su | |
| | us{invAb} | | | |
| D-1676 | [DCA- | 1767 | usUfscuaaGfaguuCfuCfcGfguusu | 2615 |
| | C6]aaccGfgAfGfAfAfcucuuagaas | | su | |
| | us{invAb} | | | |
| D-1677 | [DCA- | 1768 | usGfsaaagAfauggGfaGfuUfuggsu | 2616 |
| | C6]ccaaAfcUfCfCfCfauucuuucas | | su | |
| | us{invAb} | | | |
| D-1678 | [DCA- | 1769 | asUfsugucUfucaaAfaUfcCfcgasu | 2617 |
| | C6]ucggGfaUfUfUfUfgaagacaaus | | su | |
| | us{invAb} | | | |
| D-1679 | [DCA- | 1770 | asGfsuauuUfuaucAfuCfcAfuugsu | 2618 |
| | C6]caauGfgAfUfGfAfuaaaauacus | | su | |
| | us{invAb} | | | |
| D-1680 | [DCA- | 1771 | asCfscauAfAfgcguagAfaCfcgagg | 2619 |
| | C6]ccucggUfuCfUfAfCfgcuuaugg | | susu | |
| | s{invAb} | | | |
| D-1681 | [DCA- | 1772 | usUfscuaAfGfaguucuCfcGfguugc | 2620 |
| | C6]gcaaccGfgAfGfAfAfcucuuaga | | susu | |
| | s{invAb} | | | |
| D-1682 | [DCA- | 1773 | usGfsaaaGfAfaugggaGfuUfuggug | 2621 |
| | C6]caccaaAfcUfCfCfCfauucuuuc | | susu | |
| | s{invAb} | | | |
| D-1683 | [DCA- | 1774 | asUfsuguCfUfucaaaaUfcCfcgaag | 2622 |
| | C6]cuucggGfaUfUfUfUfgaagacaa | | susu | |
| | s{invAb} | | | |
| D-1684 | [DCA- | 1775 | asGfsuauUfUfuaucauCfcAfuuggg | 2623 |
| | C6]cccaauGfgAfUfGfAfuaaaauac | | susu | |
| | s{invAb} | | | |
| D-1685 | [DCA- | 1776 | asCfscauaAfgcguAfgAfaCfcgagg | 2624 |
| | C6]ccucggUfuCfUfAfCfgcuuaugg | | susu | |
| | s{invAb} | | | |
| D-1686 | [DCA- | 1777 | usUfscuaaGfaguuCfuCfcGfguugc | 2625 |
| | C6]gcaaccGfgAfGfAfAfcucuuaga | | susu | |
| | s{invAb} | | | |
| D-1687 | [DCA- | 1778 | usGfsaaagAfauggGfaGfuUfuggug | 2626 |
| | C6]caccaaAfcUfCfCfCfauucuuuc | | susu | |
| | s{invAb} | | | |
| D-1688 | [DCA- | 1779 | asUfsugucUfucaaAfaUfcCfcgaag | 2627 |
| | C6]cuucggGfaUfUfUfUfgaagacaa | | susu | |
| | s{invAb} | | | |
| D-1689 | [DCA- | 1780 | asGfsuauuUfuaucAfuCfcAfuuggg | 2628 |
| | C6]cccaauGfgAfUfGfAfuaaaauac | | susu | |
| | s{invAb} | | | |
| D-1690 | [DCA- | 1781 | asCfscauaagcguAfgAfaCfcgaggs | 2629 |
| | C6]ccucggUfuCfUfAfCfgcuuaugg | | usu | |
| | s{invAb} | | | |
| D-1691 | [DCA- | 1782 | usUfscuaagaguuCfuCfcGfguugcs | 2630 |
| | C6]gcaaccGfgAfGfAfAfcucuuaga | | usu | |
| | s{invAb} | | | |
| D-1692 | [DCA- | 1783 | usGfsaaagaauggGfaGfuUfuggugs | 2631 |
| | C6]caccaaAfcUfCfCfCfauucuuuc | | usu | |
| | s{invAb} | | | |
| D-1693 | [DCA- | 1784 | asUfsugucuucaaAfaUfcCfcgaags | 2632 |
| | C6]cuucggGfaUfUfUfUfgaagacaa | | usu | |
| | s{invAb} | | | |
| D-1694 | [DCA- | 1785 | usUfscuacAfgcugauCfgGfauggus | 2633 |
| | C6]accaucCfgAfUfCfAfgcuguaga | | usu | |
| | s{invAb} | | | |
| D-1695 | [DCA- | 1786 | asCfsuuucCfauauucAfcAfagaccs | 2634 |
| | C6]ggucuuGfuGfAfAfUfauggaaag | | usu | |
| | s{invAb} | | | |
| D-1696 | [DCA- | 1787 | asCfsacuuCfcaacacAfuAfgcucas | 2635 |
| | C6]ugagcuAfuGfUfGfUfuggaagug | | usu | |
| | s{invAb} | | | |
| D-1697 | [DCA- | 1788 | usGfsuaggAfuuauguAfcCfgucuus | 2636 |
| | C6]aagacgGfuAfCfAfUfaauccuac | | usu | |
| | s{invAb} | | | |
| D-1698 | [DCA- | 1789 | usAfsgagcAfaagaauUfcCfaaacus | 2637 |
| | C6]aguuugGfaAfUfUfCfuuugcucu | | usu | |
| | s{invAb} | | | |
| D-1699 | [DCA- | 1790 | asGfsuagaGfcaaagaAfuUfccaaas | 2638 |
| | C6]uuuggaAfuUfCfUfUfugcucuac | | usu | |
| | s{invAb} | | | |
| D-1700 | [GalNAc3]scauccgAfuCfAfGfCfu | 1791 | usUfscuacAfgcugAfuCfgGfaugsu | 2639 |
| | guagaasus{invAb} | | su | |
| D-1701 | [GalNAc3]sucuuguGfaAfUfAfUfg | 1792 | asCfsuuucCfauauUfcAfcAfagasu | 2640 |
| | gaaagusus{invAb} | | su | |
| D-1702 | [GalNAc3]sgacgguAfcAfUfAfAfu | 1793 | usGfsuaggAfuuauGfuAfcCfgucsu | 2641 |
| | ccuacasus{invAb} | | su | |
| D-1703 | [GalNAc3]sagcuauGfuGfUfUfGfg | 1794 | asCfsacuuCfcaacAfcAfuAfgcusu | 2642 |
| | aagugusus{invAb} | | su | |
| D-1704 | [GalNAc3]suggaauUfcUfUfUfGfc | 1795 | asGfsuagaGfcaaaGfaAfuUfccasu | 2643 |
| | ucuacusus{invAb} | | su | |
| D-1705 | [GalNAc3]suuuggaAfuUfCfUfUfu | 1796 | usAfsgagcAfaagaAfuUfcCfaaasu | 2644 |
| | gcucuasus{invAb} | | su | |
| D-1706 | [GalNAc3]sgcuauaAfuUfUfCfAfa | 1797 | asAfscuccUfugaaAfuUfaUfagcsu | 2645 |
| | ggaguusus{invAb} | | su | |
| D-1707 | [GalNAc3]scaucCfgAfUfCfAfgcu | 1798 | usUfscuacAfgcugauCfgGfaugsus | 2646 |
| | guagaasus{invAb} | | u | |
| D-1708 | [GalNAc3]sucuuGfuGfAfAfUfaug | 1799 | asCfsuuucCfauauucAfcAfagasus | 2647 |
| | gaaagusus{invAb} | | u | |
| D-1709 | [GalNAc3]sgacgGfuAfCfAfUfaau | 1800 | usGfsuaggAfuuauguAfcCfgucsus | 2648 |
| | ccuacasus{invAb} | | u | |
| D-1710 | [GalNAc3]sagcuAfuGfUfGfUfugg | 1801 | asCfsacuuCfcaacacAfuAfgcusus | 2649 |
| | aagugusus{invAb} | | u | |
| D-1711 | [GalNAc3]suggaAfuUfCfUfUfugc | 1802 | asGfsuagaGfcaaagaAfuUfccasus | 2650 |
| | ucuacusus{invAb} | | u | |
| D-1712 | [GalNAc3]suuugGfaAfUfUfCfuuu | 1803 | usAfsgagcAfaagaauUfcCfaaasus | 2651 |
| | gcucuasus{invAb} | | u | |
| D-1713 | [GalNAc3]sgcuaUfaAfUfUfUfcaa | 1804 | asAfscuccUfugaaauUfaUfagcsus | 2652 |
| | ggaguusus{invAb} | | u | |
| D-1714 | [GalNAc3]scaucCfgAfUfCfAfgcu | 1805 | usUfscuacAfgcugAfuCfgGfaugsu | 2653 |
| | guagaasus{invAb} | | su | |
| D-1715 | [GalNAc3]sucuuGfuGfAfAfUfaug | 1806 | asCfsuuucCfauauUfcAfcAfagasu | 2654 |
| | gaaagusus{invAb} | | su | |
| D-1716 | [GalNAc3]sgacgGfuAfCfAfUfaau | 1807 | usGfsuaggAfuuauGfuAfcCfgucsu | 2655 |
| | ccuacasus{invAb} | | su | |
| D-1717 | [GalNAc3]sagcuAfuGfUfGfUfugg | 1808 | asCfsacuuCfcaacAfcAfuAfgcusu | 2656 |
| | aagugusus{invAb} | | su | |
| D-1718 | [GalNAc3]suggaAfuUfCfUfUfugc | 1809 | asGfsuagaGfcaaaGfaAfuUfccasu | 2657 |
| | ucuacusus{invAb} | | su | |
| D-1719 | [GalNAc3]suuugGfaAfUfUfCfuuu | 1810 | usAfsgagcAfaagaAfuUfcCfaaasu | 2658 |
| | gcucuasus{invAb} | | su | |
| D-1720 | [GalNAc3]sgcuaUfaAfUfUfUfcaa | 1811 | asAfscuccUfugaaAfuUfaUfagcsu | 2659 |
| | ggaguusus{invAb} | | su | |
| D-1721 | [GalNAc3]saccaucCfgAfUfCfAfg | 1812 | usUfscuaCfAfgcugauCfgGfauggu | 2660 |
| | cuguagas{invAb} | | susu | |
| D-1722 | [GalNAc3]sggucuuGfuGfAfAfUfa | 1813 | asCfsuuuCfCfauauucAfcAfagacc | 2661 |
| | uggaaags{invAb} | | susu | |
| D-1723 | [GalNAc3]saagacgGfuAfCfAfUfa | 1814 | usGfsuagGfAfuuauguAfcCfgucuu | 2662 |
| | auccuacs{invAb} | | susu | |
| D-1724 | [GalNAc3]sugagcuAfuGfUfGfUfu | 1815 | asCfsacuUfCfcaacacAfuAfgcuca | 2663 |
| | ggaagugs{invAb} | | susu | |
| D-1725 | [GalNAc3]suuuggaAfuUfCfUfUfu | 1816 | asGfsuagAfGfcaaagaAfuUfccaaa | 2664 |
| | gcucuacs{invAb} | | susu | |
| D-1726 | [GalNAc3]saguuugGfaAfUfUfCfu | 1817 | usAfsgagCfAfaagaauUfcCfaaacu | 2665 |
| | uugcucus{invAb} | | susu | |
| D-1727 | [GalNAc3]suugcuaUfaAfUfUfUfc | 1818 | asAfscucCfUfugaaauUfaUfagcaa | 2666 |
| | aaggagus{invAb} | | susu | |
| D-1728 | [GalNAc3]saccaucCfgAfUfCfAfg | 1819 | usUfscuacAfgcugAfuCfgGfauggu | 2667 |
| | cuguagas{invAb} | | susu | |
| D-1729 | [GalNAc3]sggucuuGfuGfAfAfUfa | 1820 | asCfsuuucCfauauUfcAfcAfagacc | 2668 |
| | uggaaags{invAb} | | susu | |
| D-1730 | [GalNAc3]saagacgGfuAfCfAfUfa | 1821 | usGfsuaggAfuuauGfuAfcCfgucuu | 2669 |
| | auccuacs{invAb} | | susu | |
| D-1731 | [GalNAc3]sugagcuAfuGfUfGfUfu | 1822 | asCfsacuuCfcaacAfcAfuAfgcuca | 2670 |
| | ggaagugs{invAb} | | susu | |
| D-1732 | [GalNAc3]suuuggaAfuUfCfUfUfu | 1823 | asGfsuagaGfcaaaGfaAfuUfccaaa | 2671 |
| | gcucuacs{invAb} | | susu | |
| D-1733 | [GalNAc3]saguuugGfaAfUfUfCfu | 1824 | usAfsgagcAfaagaAfuUfcCfaaacu | 2672 |
| | uugcucus{invAb} | | susu | |
| D-1734 | [GalNAc3]suugcuaUfaAfUfUfUfc | 1825 | asAfscuccUfugaaAfuUfaUfagcaa | 2673 |
| | aaggagus{invAb} | | susu | |
| D-1735 | [GalNAc3]saccaucCfgAfUfCfAfg | 1826 | usUfscuacagcugAfuCfgGfauggus | 2674 |
| | cuguagas{invAb} | | usu | |
| D-1736 | [GalNAc3]sggucuuGfuGfAfAfUfa | 1827 | asCfsuuuccauauUfcAfcAfagaccs | 2675 |
| | uggaaags{invAb} | | usu | |
| D-1737 | [GalNAc3]saagacgGfuAfCfAfUfa | 1828 | usGfsuaggauuauGfuAfcCfgucuus | 2676 |
| | auccuacs{invAb} | | usu | |
| D-1738 | [GalNAc3]sugagcuAfuGfUfGfUfu | 1829 | asCfsacuuccaacAfcAfuAfgcucas | 2677 |
| | ggaagugs{invAb} | | usu | |
| D-1739 | [GalNAc3]suuuggaAfuUfCfUfUfu | 1830 | asGfsuagagcaaaGfaAfuUfccaaas | 2678 |
| | gcucuacs{invAb} | | usu | |
| D-1740 | [GalNAc3]saguuugGfaAfUfUfCfu | 1831 | usAfsgagcaaagaAfuUfcCfaaacus | 2679 |
| | uugcucus{invAb} | | usu | |
| D-1741 | [GalNAc3]suugcuaUfaAfUfUfUfc | 1832 | asAfscuccuugaaAfuUfaUfagcaas | 2680 |
| | aaggagus{invAb} | | usu | |
| D-1742 | [GalNAc3]saccaggAfaAfUfGfUfa | 1833 | usGfsguguCfuuacauUfuCfcuggus | 2681 |
| | agacaccs{invAb} | | usu | |
| D-1743 | [GalNAc3]sccaggaAfaUfGfUfAfa | 1834 | usUfsggugUfcuuacaUfuUfccuggs | 2682 |
| | gacaccas{invAb} | | usu | |
| D-1744 | [GalNAc3]scccucgUfaUfGfUfUfu | 1835 | asAfscuuuCfaaaacaUfaCfgagggs | 2683 |
| | ugaaagus{invAb} | | usu | |
| D-1745 | [GalNAc3]suuucagUfuUfUfAfAfa | 1836 | asAfscgacCfcuuuaaAfaCfugaaas | 2684 |
| | gggucgus{invAb} | | usu | |
| D-1746 | [GalNAc3]sucaguuUfuAfAfAfGfg | 1837 | asUfscacgAfcccuuuAfaAfacugas | 2685 |
| | gucgugas{invAb} | | usu | |
| D-1747 | [GalNAc3]scaguuuUfaAfAfGfGfg | 1838 | usCfsucacGfacccuuUfaAfaacugs | 2686 |
| | ucgugags{invAb} | | usu | |
| D-1748 | [GalNAc3]suuuaaaGfgGfUfCfGfu | 1839 | asGfsuuucUfcacgacCfcUfuuaaas | 2687 |
| | gagaaacs{invAb} | | usu | |
| D-1749 | [GalNAc3]sggaagcUfuGfAfGfCfu | 1840 | asAfsacacAfuagcucAfaGfcuuccs | 2688 |
| | auguguus{invAb} | | usu | |
| D-1750 | [GalNAc3]sgaagcuUfgAfGfCfUfa | 1841 | asCfsaacaCfauagcuCfaAfgcuucs | 2689 |
| | uguguugs{invAb} | | usu | |
| D-1751 | [GalNAc3]sagcuugAfgCfUfAfUfg | 1842 | usUfsccaaCfacauagCfuCfaagcus | 2690 |
| | uguuggas{invAb} | | usu | |
| D-1752 | [GalNAc3]sgcuugaGfcUfAfUfGfu | 1843 | asUfsuccaAfcacauaGfcUfcaagcs | 2691 |
| | guuggaas{invAb} | | usu | |
| D-1753 | [GalNAc3]scuugagCfuAfUfGfUfg | 1844 | asCfsuuccAfacacauAfgCfucaags | 2692 |
| | uuggaags{invAb} | | usu | |
| D-1754 | [GalNAc3]sgagcuaUfgUfGfUfUfg | 1845 | asGfscacuUfccaacaCfaUfagcucs | 2693 |
| | gaagugcs{invAb} | | usu | |
| D-1755 | [GalNAc3]sguguugGfaAfGfUfGfc | 1846 | asAfsaccaGfggcacuUfcCfaacacs | 2694 |
| | ccugguus{invAb} | | usu | |
| D-1756 | [GalNAc3]sggaaguGfcCfCfUfGfg | 1847 | asAfsuuaaAfaccaggGfcAfcuuccs | 2695 |
| | uuuuaaus{invAb} | | usu | |
| D-1757 | [GalNAc3]sacaaagAfcGfGfUfAfc | 1848 | asGfsgauuAfuguaccGfuCfuuugus | 2696 |
| | auaauccs{invAb} | | usu | |
| D-1758 | [GalNAc3]scaaagaCfgGfUfAfCfa | 1849 | usAfsggauUfauguacCfgUfcuuugs | 2697 |
| | uaauccus{invAb} | | usu | |
| D-1759 | [GalNAc3]scauaauCfcUfAfCfAfg | 1850 | asUfsuuaaAfccuguaGfgAfuuaugs | 2698 |
| | guuuaaas{invAb} | | usu | |
| D-1760 | [GalNAc3]suugcucUfaCfUfGfUfu | 1851 | asCfsaaugUfaaacagUfaGfagcaas | 2699 |
| | uacauugs{invAb} | | usu | |
| D-1761 | [GalNAc3]suugcuaUfaAfUfUfUfc | 1852 | asAfscuccUfugaaauUfaUfagcaas | 2700 |
| | aaggagus{invAb} | | usu | |
| D-1762 | [GalNAc3]saaugauGfcAfCfUfUfu | 1853 | asAfscaucCfuaaaguGfcAfucauus | 2701 |
| | aggaugus{invAb} | | usu | |
| D-1763 | [GalNAc3]saugaugCfaCfUfUfUfa | 1854 | asAfsacauCfcuaaagUfgCfaucaus | 2702 |
| | ggauguus{invAb} | | usu | |
| D-1764 | [GalNAc3]sacaugaAfuCfAfUfUfc | 1855 | asGfsucauGfugaaugAfuUfcaugus | 2703 |
| | acaugacs{invAb} | | usu | |
| D-1765 | [GalNAc3]scaugaaUfcAfUfUfCfa | 1856 | usGfsgucaUfgugaauGfaUfucaugs | 2704 |
| | caugaccs{invAb} | | usu | |
| D-1766 | [GalNAc3]saauacaUfgUfCfUfAfg | 1857 | asGfsgacaGfacuagaCfaUfguauus | 2705 |
| | ucuguccs{invAb} | | usu | |
| D-1767 | [GalNAc3]saugucuAfgUfCfUfGfu | 1858 | asUfsuaaaGfgacagaCfuAfgacaus | 2706 |
| | ccuuuaas{invAb} | | usu | |
| D-1768 | [GalNAc3]saaucagAfuCfAfUfUfa | 1859 | asUfsaacuGfguaaugAfuCfugauus | 2707 |
| | ccaguuas{invAb} | | usu | |
| D-1769 | [GalNAc3]sucagauCfaUfUfAfCfc | 1860 | asGfscuaaCfugguaaUfgAfucugas | 2708 |
| | aguuagcs{invAb} | | usu | |
| D-1770 | [GalNAc3]sagaucaUfuAfCfCfAfg | 1861 | asAfsagcuAfacugguAfaUfgaucus | 2709 |
| | uuagcuus{invAb} | | usu | |
| D-1771 | [GalNAc3]sucauuaCfcAfGfUfUfa | 1862 | usUfsaaaaGfcuaacuGfgUfaaugas | 2710 |
| | gcuuuuas{invAb} | | usu | |
| D-1772 | [GalNAc3]saccaguUfaGfCfUfUfu | 1863 | asUfsgcuuUfaaaagcUfaAfcuggus | 2711 |
| | uaaagcas{invAb} | | usu | |
| D-1773 | [GalNAc3]saagcacAfuUfUfGfUfu | 1864 | usAfsgucuUfaaacaaAfuGfugcuus | 2712 |
| | uaagacus{invAb} | | usu | |
| D-1774 | [GalNAc3]sgcacauUfuGfUfUfUfa | 1865 | asAfsuaguCfuuaaacAfaAfugugcs | 2713 |
| | agacuaus{invAb} | | usu | |
| D-1775 | [GalNAc3]sugagauGfcUfAfCfUfa | 1866 | asAfsaacaAfuuaguaGfcAfucucas | 2714 |
| | auuguuus{invAb} | | usu | |
| D-1776 | [GalNAc3]sgauuuaUfuCfAfGfGfa | 1867 | asUfsggggAfuuccugAfaUfaaaucs | 2715 |
| | auccccas{invAb} | | usu | |
| D-1777 | [GalNAc3]sugcuguGfuGfGfCfCfa | 1868 | asUfsuauaAfuuggccAfcAfcagcas | 2716 |
| | auuauaas{invAb} | | usu | |
| D-1778 | [GalNAc3]sauguaaAfaCfUfAfUfa | 1869 | asGfsggucAfguauagUfuUfuacaus | 2717 |
| | cugacccs{invAb} | | usu | |
| D-1779 | [GalNAc3]suaaaacUfaUfAfCfUfg | 1870 | asAfsacggGfucaguaUfaGfuuuuas | 2718 |
| | acccguus{invAb} | | usu | |
| D-1780 | [GalNAc3]sgagaaaCfuGfGfCfUfg | 1871 | asAfsuuggAfccagccAfgUfuucucs | 2719 |
| | guccaaus{invAb} | | usu | |
| D-1781 | [GalNAc3]sccaaugGfgAfUfUfUfa | 1872 | usGfsuugcUfguaaauCfcCfauuggs | 2720 |
| | cagcaacs{invAb} | | usu | |
| D-1782 | [GalNAc3]saguuugCfuCfUfUfAfa | 1873 | asCfsauacGfauuaagAfgCfaaacus | 2721 |
| | ucguaugs{invAb} | | usu | |
| D-1783 | [GalNAc3]sguuugcUfcUfUfAfAfu | 1874 | usCfscauaCfgauuaaGfaGfcaaacs | 2722 |
| | cguauggs{invAb} | | usu | |
| D-1784 | [GalNAc3]suuugcuCfuUfAfAfUfc | 1875 | usUfsccauAfcgauuaAfgAfgcaaas | 2723 |
| | guauggas{invAb} | | usu | |
| D-1785 | [GalNAc3]sugcucuUfaAfUfCfGfu | 1876 | asCfsuuccAfuacgauUfaAfgagcas | 2724 |
| | auggaags{invAb} | | usu | |
| D-1786 | [GalNAc3]scuuaauCfgUfAfUfGfg | 1877 | usCfsaagcUfuccauaCfgAfuuaags | 2725 |
| | aagcuugs{invAb} | | usu | |
| D-1787 | [GalNAc3]suuaaucGfuAfUfGfGfa | 1878 | asUfscaagCfuuccauAfcGfauuaas | 2726 |
| | agcuugas{invAb} | | usu | |
| D-1788 | [GalNAc3]succauaCfaCfAfAfAfg | 1879 | usGfsuaccGfucuuugUfgUfauggas | 2727 |
| | acgguacs{invAb} | | usu | |
| D-1789 | [GalNAc3]scauacaCfaAfAfGfAfc | 1880 | usAfsuguaCfcgucuuUfgUfguaugs | 2728 |
| | gguacaus{invAb} | | usu | |
| D-1790 | [GalNAc3]sugucuaGfuCfUfGfUfc | 1881 | usAfsuuaaAfggacagAfcUfagacas | 2729 |
| | cuuuaaus{invAb} | | usu | |
| D-1791 | [GalNAc3]sucuaguCfuGfUfCfCfu | 1882 | asCfsuauuAfaaggacAfgAfcuagas | 2730 |
| | uuaauags{invAb} | | usu | |
| D-1792 | [GalNAc3]scuagucUfgUfCfCfUfu | 1883 | asGfscuauUfaaaggaCfaGfacuags | 2731 |
| | uaauagcs{invAb} | | usu | |
| D-1793 | [GalNAc3]sgucuguCfcUfUfUfAfa | 1884 | asAfsgagcUfauuaaaGfgAfcagacs | 2732 |
| | uagcucus{invAb} | | usu | |
| D-1794 | [GalNAc3]sgucugcAfaCfCfGfGfa | 1885 | asAfsgaguUfcuccggUfuGfcagacs | 2733 |
| | gaacucus{invAb} | | usu | |
| D-1795 | [GalNAc3]sucugcaAfcCfGfGfAfg | 1886 | usAfsagagUfucuccgGfuUfgcagas | 2734 |
| | aacucuus{invAb} | | usu | |
| D-1796 | [GalNAc3]sugcaacCfgGfAfGfAfa | 1887 | usCfsuaagAfguucucCfgGfuugcas | 2735 |
| | cucuuags{invAb} | | usu | |
| D-1797 | [GalNAc3]saggaugAfaGfUfUfCfg | 1888 | usCfsccauGfucgaacUfuCfauccus | 2736 |
| | acaugggs{invAb} | | usu | |
| D-1798 | [GalNAc3]sgggacuUfaUfCfAfAfc | 1889 | usUfsuucuUfuguugaUfaAfgucccs | 2737 |
| | aaagaaas{invAb} | | usu | |
| D-1799 | [GalNAc3]sauacucCfuUfCfUfGfg | 1890 | asGfsuugaAfcccagaAfgGfaguaus | 2738 |
| | guucaacs{invAb} | | usu | |
| D-1800 | [GalNAc3]scaagccUfaAfAfCfGfu | 1891 | asAfsuuucUfgacguuUfaGfgcuugs | 2739 |
| | cagaaaus{invAb} | | usu | |
| D-1801 | [GalNAc3]saagccuAfaAfCfGfUfc | 1892 | asGfsauuuCfugacguUfuAfggcuus | 2740 |
| | agaaaucs{invAb} | | usu | |
| D-1802 | [GalNAc3]sgguggaCfaCfAfCfUfc | 1893 | asAfsaaugCfugagugUfgUfccaccs | 2741 |
| | agcauuus{invAb} | | usu | |
| D-1803 | [GalNAc3]sgagcuuUfgUfCfUfCfc | 1894 | asGfscacuUfcggagaCfaAfagcucs | 2742 |
| | gaagugcs{invAb} | | usu | |
| D-1804 | [GalNAc3]sugucucCfgAfAfGfUfg | 1895 | asAfscuggGfgcacuuCfgGfagacas | 2743 |
| | ccccagus{invAb} | | usu | |
| D-1805 | [GalNAc3]saugcucUfcUfCfCfUfc | 1896 | asUfsagaaCfcgaggaGfaGfagcaus | 2744 |
| | gguucuas{invAb} | | usu | |
| D-1806 | [GalNAc3]sagcucaCfaCfGfAfAfg | 1897 | usCfsugaaUfccuucgUfgUfgagcus | 2745 |
| | gauucags{invAb} | | usu | |
| D-1807 | [GalNAc3]sagaagaAfgUfAfCfAfg | 1898 | asGfsgaagGfucuguaCfuUfcuucus | 2746 |
| | accuuccs{invAb} | | usu | |
| D-1808 | [GalNAc3]sgaagaaGfuAfCfAfGfa | 1899 | usGfsggaaGfgucuguAfcUfucuucs | 2747 |
| | ccuucccs{invAb} | | usu | |
| D-1809 | [GalNAc3]saagaagUfaCfAfGfAfc | 1900 | asUfsgggaAfggucugUfaCfuucuus | 2748 |
| | cuucccas{invAb} | | usu | |
| D-1810 | [GalNAc3]sucugaaAfuGfGfAfCfa | 1901 | asGfsgucaUfuuguccAfuUfucagas | 2749 |
| | aaugaccs{invAb} | | usu | |
| D-1811 | [GalNAc3]saaaugaCfcUfUfGfCfc | 1902 | asGfsgaauUfuggcaaGfgUfcauuus | 2750 |
| | aaauuccs{invAb} | | usu | |
| D-1812 | [GalNAc3]saccuaaCfuCfCfCfAfg | 1903 | asCfscgcaUfccugggAfgUfuaggus | 2751 |
| | gaugcggs{invAb} | | usu | |
| D-1813 | [GalNAc3]sugcggcAfgCfGfAfAfg | 1904 | asUfsguguUfgcuucgCfuGfccgcas | 2752 |
| | caacacas{invAb} | | usu | |
| D-1814 | [GalNAc3]sacggccGfgUfAfAfCfa | 1905 | usCfsguucUfuuguuaCfcGfgccgus | 2753 |
| | aagaacgs{invAb} | | usu | |
| D-1815 | [GalNAc3]sggccggUfaAfCfAfAfa | 1906 | asUfsucguUfcuuuguUfaCfcggccs | 2754 |
| | gaacgaas{invAb} | | usu | |
| D-1816 | [GalNAc3]sggggucAfgAfAfGfAfc | 1907 | usUfsgcuaUfcgucuuCfuGfaccccs | 2755 |
| | gauagcas{invAb} | | usu | |
| D-1817 | [GalNAc3]sagaaagAfaCfCfAfUfc | 1908 | asCfsugauCfggauggUfuCfuuucus | 2756 |
| | cgaucags{invAb} | | usu | |
| D-1818 | [GalNAc3]sgaaccaUfcCfGfAfUfc | 1909 | asUfsacagCfugaucgGfaUfgguucs | 2757 |
| | agcuguas{invAb} | | usu | |
| D-1819 | [GalNAc3]saucuggAfaCfAfCfUfa | 1910 | asAfsugcuGfauagugUfuCfcagaus | 2758 |
| | ucagcaus{invAb} | | usu | |
| D-1820 | [GalNAc3]saagaaaAfuAfCfUfCfc | 1911 | asCfsccagAfaggaguAfuUfuucuus | 2759 |
| | uucugggs{invAb} | | usu | |
| D-1821 | [GalNAc3]sacucagGfaAfGfUfCfg | 1912 | usAfsccuuUfucgacuUfcCfugagus | 2760 |
| | aaaaggus{invAb} | | usu | |
| D-1822 | [GalNAc3]sagaaagGfaGfCfAfAfg | 1913 | asGfsuuuaGfgcuugcUfcCfuuucus | 2761 |
| | ccuaaacs{invAb} | | usu | |
| D-1823 | [GalNAc3]saggagcAfaGfCfCfUfa | 1914 | asUfsgacgUfuuaggcUfuGfcuccus | 2762 |
| | aacgucas{invAb} | | usu | |
| D-1824 | [GalNAc3]sggagcaAfgCfCfUfAfa | 1915 | usCfsugacGfuuuaggCfuUfgcuccs | 2763 |
| | acgucags{invAb} | | usu | |
| D-1825 | [GalNAc3]sagcaagCfcUfAfAfAfc | 1916 | usUfsucugAfcguuuaGfgCfuugcus | 2764 |
| | gucagaas{invAb} | | usu | |
| D-1826 | [GalNAc3]sgaaaguCfuCfAfAfUfu | 1917 | usCfsguguGfgaauugAfgAfcuuucs | 2765 |
| | ccacacgs{invAb} | | usu | |
| D-1827 | [GalNAc3]sgucucaAfuUfCfCfAfc | 1918 | asAfsgaucGfuguggaAfuUfgagacs | 2766 |
| | acgaucus{invAb} | | usu | |
| D-1828 | [GalNAc3]sucaauuCfcAfCfAfCfg | 1919 | asAfsugagAfucguguGfgAfauugas | 2767 |
| | aucucaus{invAb} | | usu | |
| D-1829 | [GalNAc3]scaauucCfaCfAfCfGfa | 1920 | usCfsaugaGfaucgugUfgGfaauugs | 2768 |
| | ucucaugs{invAb} | | usu | |
| D-1830 | [GalNAc3]sauuccaCfaCfGfAfUfc | 1921 | usCfsucauGfagaucgUfgUfggaaus | 2769 |
| | ucaugags{invAb} | | usu | |
| D-1831 | [GalNAc3]suuccacAfcGfAfUfCfu | 1922 | asUfscucaUfgagaucGfuGfuggaas | 2770 |
| | caugagas{invAb} | | usu | |
| D-1832 | [GalNAc3]sucaugaGfaGfAfAfCfu | 1923 | usCfsagguCfcaguucUfcUfcaugas | 2771 |
| | ggaccugs{invAb} | | usu | |
| D-1833 | [GalNAc3]scaugagAfgAfAfCfUfg | 1924 | asUfscaggUfccaguuCfuCfucaugs | 2772 |
| | gaccugas{invAb} | | usu | |
| D-1834 | [GalNAc3]saucccaGfcCfUfAfUfc | 1925 | usGfsguguCfagauagGfcUfgggaus | 2773 |
| | ugacaccs{invAb} | | usu | |
| D-1835 | [GalNAc3]succcagCfcUfAfUfCfu | 1926 | usUfsggugUfcagauaGfgCfugggas | 2774 |
| | gacaccas{invAb} | | usu | |
| D-1836 | [GalNAc3]scccagcCfuAfUfCfUfg | 1927 | usUfsugguGfucagauAfgGfcugggs | 2775 |
| | acaccaas{invAb} | | usu | |
| D-1837 | [GalNAc3]sagcagaGfaAfAfUfCfa | 1928 | asGfsgcauCfuugauuUfcUfcugcus | 2776 |
| | agaugccs{invAb} | | usu | |
| D-1838 | [GalNAc3]succgaaGfuGfCfCfCfc | 1929 | asUfsccgaCfuggggcAfcUfucggas | 2777 |
| | agucggas{invAb} | | usu | |
| D-1839 | [GalNAc3]sgaagauAfgAfUfUfCfg | 1930 | asUfscuucUfucgaauCfuAfucuucs | 2778 |
| | aagaagas{invAb} | | usu | |
| D-1840 | [GalNAc3]scagcgaAfgCfAfAfCfa | 1931 | asGfsggagUfguguugCfuUfcgcugs | 2779 |
| | cacucccs{invAb} | | usu | |
| D-1841 | [GalNAc3]sgcgaagCfaAfCfAfCfa | 1932 | usUfsggggAfguguguUfgCfuucgcs | 2780 |
| | cuccccas{invAb} | | usu | |
| D-1842 | [GalNAc3]suugaagCfcAfCfAfUfu | 1933 | usAfsgauuCfcaauguGfgCfuucaas | 2781 |
| | ggaaucus{invAb} | | usu | |
| D-1843 | [GalNAc3]scgguaaCfaAfAfGfAfa | 1934 | asCfscguuCfguucuuUfgUfuaccgs | 2782 |
| | cgaacggs{invAb} | | usu | |
| D-1844 | [GalNAc3]saugaagCfcAfCfUfAfu | 1935 | asCfsugucGfuauaguGfgCfuucaus | 2783 |
| | acgacags{invAb} | | usu | |
| D-1845 | [GalNAc3]scacuauAfcGfAfCfAfg | 1936 | asCfscgguAfccugucGfuAfuagugs | 2784 |
| | guaccggs{invAb} | | usu | |
| D-1846 | [DCA- | 1937 | asAfscuccUfugaaauUfaUfagcaas | 2785 |
| | C6]uugcuaUfaAfUfUfUfcaaggagu | | usu | |
| | s{invAb} | | | |
| D-1847 | {DCA- | 2831 | usUfscuaaGfaguuCfuCfcGfguugc | 3085 |
| | sC6}gcaaccGfgAfGfAfAfcucuuag | | susu | |
| | as{invAb} | | | |
| D-1848 | {DCA- | 2832 | asCfscauaAfgcguAfgAfaCfcgagg | 3086 |
| | sC6}ccucggUfuCfUfAfCfgcuuaug | | susu | |
| | gs{invAb} | | | |
| D-1849 | {DCA- | 2833 | usUfscuaagaguuCfuCfcGfguugcs | 3087 |
| | sC6}gcaaccGfgAfGfAfAfcucuuag | | usu | |
| | as{invAb} | | | |
| D-1850 | {DCA- | 2834 | asGfsuauuUfuaucauCfcAfuugsus | 3088 |
| | sC6}caauGfgAfUfGfAfuaaaauacu | | u | |
| | sus{invAb} | | | |
| D-1851 | {DCA- | 2835 | usGfsaaagAfaugggaGfuUfuggsus | 3089 |
| | sC6}ccaaAfcUfCfCfCfauucuuuca | | u | |
| | sus{invAb} | | | |
| D-1852 | {DCA- | 2836 | asCfsuuucCfauauucAfcAfagaccs | 3090 |
| | sC6}ggucuuGfuGfAfAfUfauggaaa | | usu | |
| | gs{invAb} | | | |
| D-1853 | {DCA- | 2837 | usUfscuacAfgcugauCfgGfauggus | 3091 |
| | sC6}accaucCfgAfUfCfAfgcuguag | | usu | |
| | as{invAb} | | | |
| D-1854 | {DCA- | 2838 | asGfsuagaGfcaaagaAfuUfccaaas | 3092 |
| | sC6}uuuggaAfuUfCfUfUfugcucua | | usu | |
| | cs{invAb} | | | |
| D-1855 | {DCA- | 2839 | usAfsgagcAfaagaauUfcCfaaacus | 3093 |
| | sC6}aguuugGfaAfUfUfCfuuugcuc | | usu | |
| | us{invAb} | | | |
| D-1856 | {DCA- | 2840 | usGfsuaggAfuuauguAfcCfgucuus | 3094 |
| | sC6}aagacgGfuAfCfAfUfaauccua | | usu | |
| | cs{invAb} | | | |
| D-1857 | {DCA- | 2841 | asCfsacuuCfcaacacAfuAfgcucas | 3095 |
| | sC6}ugagcuAfuGfUfGfUfuggaagu | | usu | |
| | gs{invAb} | | | |
| D-1858 | {DCA- | 2842 | usGfsaaagAfaugggaGfuUfuggugs | 3096 |
| | sC6}caccaaAfcUfCfCfCfauucuuu | | usu | |
| | cs{invAb} | | | |
| D-1859 | {DCA- | 2843 | usUfscuaaGfaguucuCfcGfguugcs | 3097 |
| | sC6}gcaaccGfgAfGfAfAfcucuuag | | usu | |
| | as{invAb} | | | |
| D-1860 | {DCA- | 2844 | asCfscauaAfgcguagAfaCfcgaggs | 3098 |
| | sC6}ccucggUfuCfUfAfCfgcuuaug | | usu | |
| | gs{invAb} | | | |
| D-1861 | {DCA- | 2845 | asGfsuauuUfuaucauCfcAfuugggs | 3099 |
| | sC6}cccaauGfgAfUfGfAfuaaaaua | | usu | |
| | cs{invAb} | | | |
| D-1862 | {DCA- | 2846 | asAfscuccUfugaaauUfaUfagcaas | 3100 |
| | sC6}uugcuaUfaAfUfUfUfcaaggag | | usu | |
| | us{invAb} | | | |
| D-1863 | {DCA- | 2847 | usGfsuagGfAfuuauguAfcCfgucuu | 3101 |
| | C6}aagacgGfuAfCfAfUfaauccuac | | susu | |
| | s{invAb} | | | |
| D-1864 | {DCA- | 2848 | usAfsgagcAfaagaAfuUfcCfaaacu | 3102 |
| | C6}aguuugGfaAfUfUfCfuuugcucu | | susu | |
| | s{invAb} | | | |
| D-1865 | {DCA- | 2849 | usGfsuaggAfuuauGfuAfcCfgucuu | 3103 |
| | C6}aagacgGfuAfCfAfUfaauccuac | | susu | |
| | s{invAb} | | | |
| D-1866 | {DCA- | 2850 | usGfsuaggauuauGfuAfcCfgucuus | 3104 |
| | C6}aagacgGfuAfCfAfUfaauccuac | | usu | |
| | s{invAb} | | | |
| D-1867 | {DCA- | 2851 | asCfsuuuccauauUfcAfcAfagaccs | 3105 |
| | C6}ggucuuGfuGfAfAfUfauggaaag | | usu | |
| | s{invAb} | | | |
| D-1868 | {DCA- | 2852 | asGfsuagaGfcaaagaAfuUfccasus | 3106 |
| | C6}uggaAfuUfCfUfUfugcucuacus | | u | |
| | us{invAb} | | | |
| D-1869 | {DCA- | 2853 | usGfsuaggAfuuauguAfcCfgucsus | 3107 |
| | C6}gacgGfuAfCfAfUfaauccuacas | | u | |
| | us{invAb} | | | |
| D-1870 | {DCA- | 2854 | usAfsgagcAfaagaAfuUfcCfaaasu | 3108 |
| | C6}uuugGfaAfUfUfCfuuugcucuas | | su | |
| | us{invAb} | | | |
| D-1871 | {DCA- | 2855 | asGfsuagaGfcaaaGfaAfuUfccasu | 3109 |
| | C6}uggaAfuUfCfUfUfugcucuacus | | su | |
| | us{invAb} | | | |
| D-1872 | {DCA- | 2856 | usGfsuaggAfuuauGfuAfcCfgucsu | 3110 |
| | C6}gacgGfuAfCfAfUfaauccuacas | | su | |
| | us{invAb} | | | |
| D-1873 | {DCA- | 2857 | usUfscuacAfgcugAfuCfgGfaugsu | 3111 |
| | C6}caucCfgAfUfCfAfgcuguagaas | | su | |
| | us{invAb} | | | |
| D-1874 | {DCA- | 2858 | asAfscuccUfugaaAfuUfaUfagcsu | 3112 |
| | C6}gcuauaAfuUfUfCfAfaggaguus | | su | |
| | us{invAb} | | | |
| D-1875 | {DCA- | 2859 | usAfsgagcAfaagaAfuUfcCfaaasu | 3113 |
| | C6}uuuggaAfuUfCfUfUfugcucuas | | su | |
| | us{invAb} | | | |
| D-1876 | {DCA- | 2860 | asGfsuagaGfcaaaGfaAfuUfccasu | 3114 |
| | C6}uggaauUfcUfUfUfGfcucuacus | | su | |
| | us{invAb} | | | |
| D-1877 | {DCA- | 2861 | usGfsuaggAfuuauGfuAfcCfgucsu | 3115 |
| | C6}gacgguAfcAfUfAfAfuccuacas | | su | |
| | us{invAb} | | | |
| D-1878 | {DCA- | 2862 | usGfsuaggAfuuauGfuAfcCfgucsu | 3116 |
| | C6}gsacgGfuAfCfAfUfaauccuaca | | su | |
| | sus{invAb} | | | |
| D-1879 | [GalNAc3]sgsacgGfuAfCfAfUfaa | 2863 | usGfsuaggAfuuauGfuAfcCfgucsu | 3117 |
| | uccuacasus{invAb} | | su | |
| D-1880 | {DCA- | 2864 | usGfsuaggAfuuauGfuAfcCfgucsu | 3118 |
| | sC6}gacgGfuAfCfAfUfaauccuaca | | su | |
| | sus{invAb} | | | |
| D-1881 | {DCA- | 2865 | usGfsuaggauuauGfuAfcCfgucuus | 3119 |
| | sC6}aagacgGfuAfCfAfUfaauccua | | usu | |
| | cs{invAb} | | | |
| D-1882 | {DCA- | 2866 | asGfsuagaGfcaaaGfaAfuUfccasu | 3120 |
| | sC6}uggaAfuUfCfUfUfugcucuacu | | su | |
| | sus{invAb} | | | |
| D-1883 | {DCA- | 2867 | usAfsgagcAfaagaAfuUfcCfaaasu | 3121 |
| | sC6}uuugGfaAfUfUfCfuuugcucua | | su | |
| | sus{invAb} | | | |
| D-1884 | {DCA- | 2868 | usGfsuaggAfuuauGfuAfcCfgucsu | 3122 |
| | sC6}gacgguAfcAfUfAfAfuccuaca | | su | |
| | sus{invAb} | | | |
| D-1885 | {DCA- | 2869 | asGfsuagaGfcaaaGfaAfuUfccasu | 3123 |
| | sC6}uggaauUfcUfUfUfGfcucuacu | | su | |
| | sus{invAb} | | | |
| D-1886 | {DCA- | 2870 | usAfsgagcAfaagaAfuUfcCfaaasu | 3124 |
| | sC6}uuuggaAfuUfCfUfUfugcucua | | su | |
| | sus{invAb} | | | |
| D-1887 | {DCA- | 2871 | usGfsuaggAfuuauguAfcCfgucsus | 3125 |
| | sC6}gacgGfuAfCfAfUfaauccuaca | | u | |
| | sus{invAb} | | | |
| D-1888 | {DCA- | 2872 | asGfsuagaGfcaaagaAfuUfccasus | 3126 |
| | sC6}uggaAfuUfCfUfUfugcucuacu | | u | |
| | sus{invAb} | | | |
| D-1889 | | 2873 | | 3127 |
| D-1890 | | 2874 | | 3128 |
| D-1891 | [GalNAc3]saaucagAfuCfAfUfUfa | 2875 | asUfsaacUfGfguaaugAfuCfugauu | 3129 |
| | ccaguuas{invAb} | | susu | |
| D-1892 | [GalNAc3]scuagucUfgUfCfCfUfu | 2876 | asGfscuaUfUfaaaggaCfaGfacuag | 3130 |
| | uaauagcs{invAb} | | susu | |
| D-1893 | [GalNAc3]sgcacauUfuGfUfUfUfa | 2877 | asAfsuagUfCfuuaaacAfaAfugugc | 3131 |
| | agacuaus{invAb} | | susu | |
| D-1894 | [GalNAc3]sccaaugGfgAfUfUfUfa | 2878 | usGfsuugCfUfguaaauCfcCfauugg | 3132 |
| | cagcaacs{invAb} | | susu | |
| D-1895 | [GalNAc3]sguuugcUfcUfUfAfAfu | 2879 | usCfscauAfCfgauuaaGfaGfcaaac | 3133 |
| | cguauggs{invAb} | | susu | |
| D-1896 | [GalNAc3]scccucgUfaUfGfUfUfu | 2880 | asAfscuuUfCfaaaacaUfaCfgaggg | 3134 |
| | ugaaagus{invAb} | | susu | |
| D-1897 | [GalNAc3]saaucagAfuCfAfUfUfa | 2881 | asUfsaacuGfguaaUfgAfuCfugauu | 3135 |
| | ccaguuas{invAb} | | susu | |
| D-1898 | [GalNAc3]scuagucUfgUfCfCfUfu | 2882 | asGfscuauUfaaagGfaCfaGfacuag | 3136 |
| | uaauagcs{invAb} | | susu | |
| D-1899 | [GalNAc3]sgcacauUfuGfUfUfUfa | 2883 | asAfsuaguCfuuaaAfcAfaAfugugc | 3137 |
| | agacuaus{invAb} | | susu | |
| D-1900 | [GalNAc3]sccaaugGfgAfUfUfUfa | 2884 | usGfsuugcUfguaaAfuCfcCfauugg | 3138 |
| | cagcaacs{invAb} | | susu | |
| D-1901 | [GalNAc3]sguuugcUfcUfUfAfAfu | 2885 | usCfscauaCfgauuAfaGfaGfcaaac | 3139 |
| | cguauggs{invAb} | | susu | |
| D-1902 | [GalNAc3]scccucgUfaUfGfUfUfu | 2886 | asAfscuuuCfaaaaCfaUfaCfgaggg | 3140 |
| | ugaaagus{invAb} | | susu | |
| D-1903 | [GalNAc3]saaucagAfuCfAfUfUfa | 2887 | asUfsaacugguaaUfgAfuCfugauus | 3141 |
| | ccaguuas{invAb} | | usu | |
| D-1904 | [GalNAc3]scuagucUfgUfCfCfUfu | 2888 | asGfscuauuaaagGfaCfaGfacuags | 3142 |
| | uaauagcs{invAb} | | usu | |
| D-1905 | [GalNAc3]sgcacauUfuGfUfUfUfa | 2889 | asAfsuagucuuaaAfcAfaAfugugcs | 3143 |
| | agacuaus{invAb} | | usu | |
| D-1906 | [GalNAc3]sccaaugGfgAfUfUfUfa | 2890 | usGfsuugcuguaaAfuCfcCfauuggs | 3144 |
| | cagcaacs{invAb} | | usu | |
| D-1907 | [GalNAc3]sguuugcUfcUfUfAfAfu | 2891 | usCfscauacgauuAfaGfaGfcaaacs | 3145 |
| | cguauggs{invAb} | | usu | |
| D-1908 | [GalNAc3]scccucgUfaUfGfUfUfu | 2892 | asAfscuuucaaaaCfaUfaCfgagggs | 3146 |
| | ugaaagus{invAb} | | usu | |
| D-1909 | [GalNAc3]sucagAfuCfAfUfUfacc | 2893 | asUfsaacuGfguaaugAfuCfugasus | 3147 |
| | aguuausus{invAb} | | u | |
| D-1910 | [GalNAc3]sagucUfgUfCfCfUfuua | 2894 | asGfscuauUfaaaggaCfaGfacusus | 3148 |
| | auagcusus{invAb} | | u | |
| D-1911 | [GalNAc3]sacauUfuGfUfUfUfaag | 2895 | asAfsuaguCfuuaaacAfaAfugusus | 3149 |
| | acuauusus{invAb} | | u | |
| D-1912 | [GalNAc3]saaugGfgAfUfUfUfaca | 2896 | usGfsuugcUfguaaauCfcCfauusus | 3150 |
| | gcaacasus{invAb} | | u | |
| D-1913 | [GalNAc3]suugcUfcUfUfAfAfucg | 2897 | usCfscauaCfgauuaaGfaGfcaasus | 3151 |
| | uauggasus{invAb} | | u | |
| D-1914 | [GalNAc3]scucgUfaUfGfUfUfuug | 2898 | asAfscuuuCfaaaacaUfaCfgagsus | 3152 |
| | aaaguusus{invAb} | | u | |
| D-1915 | [GalNAc3]sucagAfuCfAfUfUfacc | 2899 | asUfsaacuGfguaaUfgAfuCfugasu | 3153 |
| | aguuausus{invAb} | | su | |
| D-1916 | [GalNAc3]sagucUfgUfCfCfUfuua | 2900 | asGfscuauUfaaagGfaCfaGfacusu | 3154 |
| | auagcusus{invAb} | | su | |
| D-1917 | [GalNAc3]sacauUfuGfUfUfUfaag | 2901 | asAfsuaguCfuuaaAfcAfaAfugusu | 3155 |
| | acuauusus{invAb} | | su | |
| D-1918 | [GalNAc3]saaugGfgAfUfUfUfaca | 2902 | usGfsuugcUfguaaAfuCfcCfauusu | 3156 |
| | gcaacasus{invAb} | | su | |
| D-1919 | [GalNAc3]suugcUfcUfUfAfAfucg | 2903 | usCfscauaCfgauuAfaGfaGfcaasu | 3157 |
| | uauggasus{invAb} | | su | |
| D-1920 | [GalNAc3]scucgUfaUfGfUfUfuug | 2904 | asAfscuuuCfaaaaCfaUfaCfgagsu | 3158 |
| | aaaguusus{invAb} | | su | |
| D-1921 | [GalNAc3]sucagauCfaUfUfAfCfc | 2905 | asUfsaacuGfguaaUfgAfuCfugasu | 3159 |
| | aguuausus{invAb} | | su | |
| D-1922 | [GalNAc3]sagucugUfcCfUfUfUfa | 2906 | asGfscuauUfaaagGfaCfaGfacusu | 3160 |
| | auagcusus{invAb} | | su | |
| D-1923 | [GalNAc3]sacauuuGfuUfUfAfAfg | 2907 | asAfsuaguCfuuaaAfcAfaAfugusu | 3161 |
| | acuauusus{invAb} | | su | |
| D-1924 | [GalNAc3]saaugggAfuUfUfAfCfa | 2908 | usGfsuugcUfguaaAfuCfcCfauusu | 3162 |
| | gcaacasus{invAb} | | su | |
| D-1925 | [GalNAc3]suugcucUfuAfAfUfCfg | 2909 | usCfscauaCfgauuAfaGfaGfcaasu | 3163 |
| | uauggasus{invAb} | | su | |
| D-1926 | [GalNAc3]scucguaUfgUfUfUfUfg | 2910 | asAfscuuuCfaaaaCfaUfaCfgagsu | 3164 |
| | aaaguusus{invAb} | | su | |
| D-1927 | [GalNAc3]sasasucagAfuCfAfUfU | 2911 | asUfsaacuGfgUfaaugAfuCfugauu | 3165 |
| | faccaguusas{invAb} | | susu | |
| D-1928 | [GalNAc3]scsusagucUfgUfCfCfU | 2912 | asGfscuauUfaAfaggaCfaGfacuag | 3166 |
| | fuuaauagscs{invAb} | | susu | |
| D-1929 | [GalNAc3]sgscsacauUfuGfUfUfU | 2913 | asAfsuaguCfuUfaaacAfaAfugugc | 3167 |
| | faagacuasus{invAb} | | susu | |
| D-1930 | [GalNAc3]scscsaaugGfgAfUfUfU | 2914 | usGfsuugcUfgUfaaauCfcCfauugg | 3168 |
| | facagcaascs{invAb} | | susu | |
| D-1931 | [GalNAc3]sgsusuugcUfcUfUfAfA | 2915 | usCfscauaCfgAfuuaaGfaGfcaaac | 3169 |
| | fucguaugsgs{invAb} | | susu | |
| D-1932 | [GalNAc3]scscscucgUfaUfGfUfU | 2916 | asAfscuuuCfaAfaacaUfaCfgaggg | 3170 |
| | fuugaaagsus{invAb} | | susu | |
| D-1933 | [GalNAc3]saagaaaAfuAfCfUfCfc | 2917 | asCfsccaGfAfaggaguAfuUfuucuu | 3171 |
| | uucugggs{invAb} | | susu | |
| D-1934 | [GalNAc3]sucagauCfaUfUfAfCfc | 2918 | asGfscuaAfCfugguaaUfgAfucuga | 3172 |
| | aguuagcs{invAb} | | susu | |
| D-1935 | [GalNAc3]saccuaaCfuCfCfCfAfg | 2919 | asCfscgcAfUfccugggAfgUfuaggu | 3173 |
| | gaugcggs{invAb} | | susu | |
| D-1936 | [GalNAc3]saagcacAfuUfUfGfUfu | 2920 | usAfsgucUfUfaaacaaAfuGfugcuu | 3174 |
| | uaagacus{invAb} | | susu | |
| D-1937 | [GalNAc3]sugcuguGfuGfGfCfCfa | 2921 | asUfsuauAfAfuuggccAfcAfcagca | 3175 |
| | auuauaas{invAb} | | susu | |
| D-1938 | [GalNAc3]sucugaaAfuGfGfAfCfa | 2922 | asGfsgucAfUfuuguccAfuUfucaga | 3176 |
| | aaugaccs{invAb} | | susu | |
| D-1939 | [GalNAc3]saagaaaAfuAfCfUfCfc | 2923 | asCfsccagAfaggaGfuAfuUfuucuu | 3177 |
| | uucugggs{invAb} | | susu | |
| D-1940 | [GalNAc3]sucagauCfaUfUfAfCfc | 2924 | asGfscuaaCfugguAfaUfgAfucuga | 3178 |
| | aguuagcs{invAb} | | susu | |
| D-1941 | [GalNAc3]saccuaaCfuCfCfCfAfg | 2925 | asCfscgcaUfccugGfgAfgUfuaggu | 3179 |
| | gaugcggs{invAb} | | susu | |
| D-1942 | [GalNAc3]saagcacAfuUfUfGfUfu | 2926 | usAfsgucuUfaaacAfaAfuGfugcuu | 3180 |
| | uaagacus{invAb} | | susu | |
| D-1943 | [GalNAc3]sugcuguGfuGfGfCfCfa | 2927 | asUfsuauaAfuuggCfcAfcAfcagca | 3181 |
| | auuauaas{invAb} | | susu | |
| D-1944 | [GalNAc3]sucugaaAfuGfGfAfCfa | 2928 | asGfsgucaUfuuguCfcAfuUfucaga | 3182 |
| | aaugaccs{invAb} | | susu | |
| D-1945 | [GalNAc3]saagaaaAfuAfCfUfCfc | 2929 | asCfsccagaaggaGfuAfuUfuucuus | 3183 |
| | uucugggs{invAb} | | usu | |
| D-1946 | [GalNAc3]sucagauCfaUfUfAfCfc | 2930 | asGfscuaacugguAfaUfgAfucugas | 3184 |
| | aguuagcs{invAb} | | usu | |
| D-1947 | [GalNAc3]saccuaaCfuCfCfCfAfg | 2931 | asCfscgcauccugGfgAfgUfuaggus | 3185 |
| | gaugcggs{invAb} | | usu | |
| D-1948 | [GalNAc3]saagcacAfuUfUfGfUfu | 2932 | usAfsgucuuaaacAfaAfuGfugcuus | 3186 |
| | uaagacus{invAb} | | usu | |
| D-1949 | [GalNAc3]sugcuguGfuGfGfCfCfa | 2933 | asUfsuauaauuggCfcAfcAfcagcas | 3187 |
| | auuauaas{invAb} | | usu | |
| D-1950 | [GalNAc3]sucugaaAfuGfGfAfCfa | 2934 | asGfsgucauuuguCfcAfuUfucagas | 3188 |
| | aaugaccs{invAb} | | usu | |
| D-1951 | [GalNAc3]sgaaaAfuAfCfUfCfcuu | 2935 | asCfsccagAfaggaguAfuUfuucsus | 3189 |
| | cugggusus{invAb} | | u | |
| D-1952 | [GalNAc3]sagauCfaUfUfAfCfcag | 2936 | asGfscuaaCfugguaaUfgAfucusus | 3190 |
| | uuagcusus{invAb} | | u | |
| D-1953 | [GalNAc3]scuaaCfuCfCfCfAfgga | 2937 | asCfscgcaUfccugggAfgUfuagsus | 3191 |
| | ugcggusus{invAb} | | u | |
| D-1954 | [GalNAc3]sgcacAfuUfUfGfUfuua | 2938 | usAfsgucuUfaaacaaAfuGfugcsus | 3192 |
| | agacuasus{invAb} | | u | |
| D-1955 | [GalNAc3]scuguGfuGfGfCfCfaau | 2939 | asUfsuauaAfuuggccAfcAfcagsus | 3193 |
| | uauaausus{invAb} | | u | |
| D-1956 | [GalNAc3]sugaaAfuGfGfAfCfaaa | 2940 | asGfsgucaUfuuguccAfuUfucasus | 3194 |
| | ugaccusus{invAb} | | u | |
| D-1957 | [GalNAc3]sgaaaAfuAfCfUfCfcuu | 2941 | asCfsccagAfaggaGfuAfuUfuucsu | 3195 |
| | cugggusus{invAb} | | su | |
| D-1958 | [GalNAc3]sagauCfaUfUfAfCfcag | 2942 | asGfscuaaCfugguAfaUfgAfucusu | 3196 |
| | uuagcusus{invAb} | | su | |
| D-1959 | [GalNAc3]scuaaCfuCfCfCfAfgga | 2943 | asCfscgcaUfccugGfgAfgUfuagsu | 3197 |
| | ugcggusus{invAb} | | su | |
| D-1960 | [GalNAc3]sgcacAfuUfUfGfUfuua | 2944 | usAfsgucuUfaaacAfaAfuGfugcsu | 3198 |
| | agacuasus{invAb} | | su | |
| D-1961 | [GalNAc3]scuguGfuGfGfCfCfaau | 2945 | asUfsuauaAfuuggCfcAfcAfcagsu | 3199 |
| | uauaausus{invAb} | | su | |
| D-1962 | [GalNAc3]sugaaAfuGfGfAfCfaaa | 2946 | asGfsgucaUfuuguCfcAfuUfucasu | 3200 |
| | ugaccusus{invAb} | | su | |
| D-1963 | [GalNAc3]sgaaaauAfcUfCfCfUfu | 2947 | asCfsccagAfaggaGfuAfuUfuucsu | 3201 |
| | cugggusus{invAb} | | su | |
| D-1964 | [GalNAc3]sagaucaUfuAfCfCfAfg | 2948 | asGfscuaaCfugguAfaUfgAfucusu | 3202 |
| | uuagcusus{invAb} | | su | |
| D-1965 | [GalNAc3]scuaacuCfcCfAfGfGfa | 2949 | asCfscgcaUfccugGfgAfgUfuagsu | 3203 |
| | ugcggusus{invAb} | | su | |
| D-1966 | [GalNAc3]sgcacauUfuGfUfUfUfa | 2950 | usAfsgucuUfaaacAfaAfuGfugcsu | 3204 |
| | agacuasus{invAb} | | su | |
| D-1967 | [GalNAc3]scuguguGfgCfCfAfAfu | 2951 | asUfsuauaAfuuggCfcAfcAfcagsu | 3205 |
| | uauaausus{invAb} | | su | |
| D-1968 | [GalNAc3]sugaaauGfgAfCfAfAfa | 2952 | asGfsgucaUfuuguCfcAfuUfucasu | 3206 |
| | ugaccusus{invAb} | | su | |
| D-1969 | [GalNAc3]sasasgaaaAfuAfCfUfC | 2953 | asCfsccagAfaGfgaguAfuUfuucuu | 3207 |
| | fcuucuggsgs{invAb} | | susu | |
| D-1970 | [GalNAc3]suscsagauCfaUfUfAfC | 2954 | asGfscuaaCfuGfguaaUfgAfucuga | 3208 |
| | fcaguuagscs{invAb} | | susu | |
| D-1971 | [GalNAc3]sascscuaaCfuCfCfCfA | 2955 | asCfscgcaUfcCfugggAfgUfuaggu | 3209 |
| | fggaugcgsgs{invAb} | | susu | |
| D-1972 | [GalNAc3]sasasgcacAfuUfUfGfU | 2956 | usAfsgucuUfaAfacaaAfuGfugcuu | 3210 |
| | fuuaagacsus{invAb} | | susu | |
| D-1973 | [GalNAc3]susgscuguGfuGfGfCfC | 2957 | asUfsuauaAfuUfggccAfcAfcagca | 3211 |
| | faauuauasas{invAb} | | susu | |
| D-1974 | [GalNAc3]suscsugaaAfuGfGfAfC | 2958 | asGfsgucaUfuUfguccAfuUfucaga | 3212 |
| | faaaugacscs{invAb} | | susu | |
| D-1975 | {DCA- | 2959 | asAfsuaguCfuuaaacAfaAfugugcs | 3213 |
| | C6}gcacauUfuGfUfUfUfaagacuau | | usu | |
| | s{invAb} | | | |
| D-1976 | {DCA- | 2960 | asAfsuaguCfuuaaacAfaAfugugcs | 3214 |
| | sC6}gcacauUfuGfUfUfUfaagacua | | usu | |
| | us{invAb} | | | |
| D-1977 | [GalNAc3]sgscacauUfuGfUfUfUf | 2961 | asAfsuaguCfuuaaacAfaAfugugcs | 3215 |
| | aagacuaus{invAb} | | usu | |
| D-1978 | [GalNAc3]sasagacgGfuAfCfAfUf | 2962 | usGfsuaggAfuuauguAfcCfgucuus | 3216 |
| | aauccuacs{invAb} | | usu | |
| D-1979 | [GalNAc3]susuuggaAfuUfCfUfUf | 2963 | asGfsuagaGfcaaagaAfuUfccaaas | 3217 |
| | ugcucuacs{invAb} | | usu | |
| D-1980 | [GalNAc3]sasguuugGfaAfUfUfCf | 2964 | usAfsgagcAfaagaauUfcCfaaacus | 3218 |
| | uuugcucus{invAb} | | usu | |
| D-1981 | [GalNAc3]susugcuaUfaAfUfUfUf | 2965 | asAfscuccUfugaaauUfaUfagcaas | 3219 |
| | caaggagus{invAb} | | usu | |
| D-1982 | [GalNAc3]sascauUfuGfUfUfUfaa | 2966 | asAfsuaguCfuuaaAfcAfaAfugusu | 3220 |
| | gacuauusus{invAb} | | su | |
| D-1983 | [GalNAc3]susggaAfuUfCfUfUfug | 2967 | asGfsuagaGfcaaaGfaAfuUfccasu | 3221 |
| | cucuacusus{invAb} | | su | |
| D-1984 | [GalNAc3]susuugGfaAfUfUfCfuu | 2968 | usAfsgagcAfaagaAfuUfcCfaaasu | 3222 |
| | ugcucuasus{invAb} | | su | |
| D-1985 | [GalNAc3]sgscuaUfaAfUfUfUfca | 2969 | asAfscuccUfugaaAfuUfaUfagcsu | 3223 |
| | aggaguusus{invAb} | | su | |
| D-1986 | [GalNAc3]sascauuuGfuUfUfAfAf | 2970 | asAfsuaguCfuuaaAfcAfaAfugusu | 3224 |
| | gacuauusus{invAb} | | su | |
| D-1987 | [GalNAc3]sgsacgguAfcAfUfAfAf | 2971 | usGfsuaggAfuuauGfuAfcCfgucsu | 3225 |
| | uccuacasus{invAb} | | su | |
| D-1988 | [GalNAc3]susggaauUfcUfUfUfGf | 2972 | asGfsuagaGfcaaaGfaAfuUfccasu | 3226 |
| | cucuacusus{invAb} | | su | |
| D-1989 | [GalNAc3]susuuggaAfuUfCfUfUf | 2973 | usAfsgagcAfaagaAfuUfcCfaaasu | 3227 |
| | ugcucuasus{invAb} | | su | |
| D-1990 | [GalNAc3]sgscuauaAfuUfUfCfAf | 2974 | asAfscuccUfugaaAfuUfaUfagcsu | 3228 |
| | aggaguusus{invAb} | | su | |
| D-1991 | [GalNAc3]sascauUfuGfUfUfUfaa | 2975 | asAfsuaguCfuuaaacAfaAfugusus | 3229 |
| | gacuauusus{invAb} | | u | |
| D-1992 | [GalNAc3]sgsacgGfuAfCfAfUfaa | 2976 | usGfsuaggAfuuauguAfcCfgucsus | 3230 |
| | uccuacasus{invAb} | | u | |
| D-1993 | [GalNAc3]susggaAfuUfCfUfUfug | 2977 | asGfsuagaGfcaaagaAfuUfccasus | 3231 |
| | cucuacusus{invAb} | | u | |
| D-1994 | [GalNAc3]susuugGfaAfUfUfCfuu | 2978 | usAfsgagcAfaagaauUfcCfaaasus | 3232 |
| | ugcucuasus{invAb} | | u | |
| D-1995 | [GalNAc3]sgscuaUfaAfUfUfUfca | 2979 | asAfscuccUfugaaauUfaUfagcsus | 3233 |
| | aggaguusus{invAb} | | u | |
| D-1996 | [GalNAc3]sascauuuGfuUfUfAfAf | 2980 | asAfsuaguCfuuAfaAfcAfaaugusu | 3234 |
| | gacuauusus{invAb} | | su | |
| D-1997 | [GalNAc3]sgsacgguAfcAfUfAfAf | 2981 | usGfsuaggAfuuAfuGfuAfccgucsu | 3235 |
| | uccuacasus{invAb} | | su | |
| D-1998 | [GalNAc3]susggaauUfcUfUfUfGf | 2982 | asGfsuagaGfcaAfaGfaAfuuccasu | 3236 |
| | cucuacusus{invAb} | | su | |
| D-1999 | [GalNAc3]susuuggaAfuUfCfUfUf | 2983 | usAfsgagcAfaaGfaAfuUfccaaasu | 3237 |
| | ugcucuasus{invAb} | | su | |
| D-2000 | [GalNAc3]sgscuauaAfuUfUfCfAf | 2984 | asAfscuccUfugAfaAfuUfauagcsu | 3238 |
| | aggaguusus{invAb} | | su | |
| D-2001 | {DCA- | 2985 | asAfsuaguCfuuaaAfcAfaAfugusu | 3239 |
| | sC6}ascauUfuGfUfUfUfaagacuau | | su | |
| | usus{invAb} | | | |
| D-2002 | {DCA- | 2986 | usGfsuaggAfuuauGfuAfcCfgucsu | 3240 |
| | sC6}gsacgGfuAfCfAfUfaauccuac | | su | |
| | asus{invAb} | | | |
| D-2003 | {DCA- | 2987 | asGfsuagaGfcaaaGfaAfuUfccasu | 3241 |
| | sC6}usggaAfuUfCfUfUfugcucuac | | su | |
| | usus{invAb} | | | |
| D-2004 | {DCA- | 2988 | usAfsgagcAfaagaAfuUfcCfaaasu | 3242 |
| | sC6}usuugGfaAfUfUfCfuuugcucu | | su | |
| | asus{invAb} | | | |
| D-2005 | {DCA- | 2989 | asAfscuccUfugaaAfuUfaUfagcsu | 3243 |
| | sC6}gscuaUfaAfUfUfUfcaaggagu | | su | |
| | usus{invAb} | | | |
| D-2006 | [GalNAc3]sascscaucCfgAfUfCfA | 2990 | usUfscuacAfgCfugauCfgGfauggu | 3244 |
| | fgcuguagsas{invAb} | | susu | |
| D-2007 | [GalNAc3]sgsgsucuuGfuGfAfAfU | 2991 | asCfsuuucCfaUfauucAfcAfagacc | 3245 |
| | fauggaaasgs{invAb} | | susu | |
| D-2008 | [GalNAc3]sasasgacgGfuAfCfAfU | 2992 | usGfsuaggAfuUfauguAfcCfgucuu | 3246 |
| | faauccuascs{invAb} | | susu | |
| D-2009 | [GalNAc3]sgscsaaccGfgAfGfAfA | 2993 | usUfscuaaGfaGfuucuCfcGfguugc | 3247 |
| | fcucuuagsas{invAb} | | susu | |
| D-2010 | [GalNAc3]scsasccaaAfcUfCfCfC | 2994 | usGfsaaagAfaUfgggaGfuUfuggug | 3248 |
| | fauucuuuscs{invAb} | | susu | |
| D-2011 | [GalNAc3]susgsagcuAfuGfUfGfU | 2995 | asCfsacuuCfcAfacacAfuAfgcuca | 3249 |
| | fuggaagusgs{invAb} | | susu | |
| D-2012 | [GalNAc3]sususuggaAfuUfCfUfU | 2996 | asGfsuagaGfcAfaagaAfuUfccaaa | 3250 |
| | fugcucuascs{invAb} | | susu | |
| D-2013 | [GalNAc3]sasgsuuugGfaAfUfUfC | 2997 | usAfsgagcAfaAfgaauUfcCfaaacu | 3251 |
| | fuuugcucsus{invAb} | | susu | |
| D-2014 | [GalNAc3]sususgcuaUfaAfUfUfU | 2998 | asAfscuccUfuGfaaauUfaUfagcaa | 3252 |
| | fcaaggagsus{invAb} | | susu | |
| D-2015 | [GalNAc3]sasccauccgAfuCfAfGf | 2999 | usUfscuacAfgcugAfuCfggauggus | 3253 |
| | Cfuguagas{invAb} | | usu | |
| D-2016 | [GalNAc3]sgsgucuuguGfaAfUfAf | 3000 | asCfsuuucCfauauUfcAfcaagaccs | 3254 |
| | Ufggaaags{invAb} | | usu | |
| D-2017 | [GalNAc3]sasagacgguAfcAfUfAf | 3001 | usGfsuaggAfuuauGfuAfccgucuus | 3255 |
| | Afuccuacs{invAb} | | usu | |
| D-2018 | [GalNAc3]sgscaaccggAfgAfAfCf | 3002 | usUfscuaaGfaguuCfuCfcgguugcs | 3256 |
| | Ufcuuagas{invAb} | | usu | |
| D-2019 | [GalNAc3]scsaccaaacUfcCfCfAf | 3003 | usGfsaaagAfauggGfaGfuuuggugs | 3257 |
| | Ufucuuucs{invAb} | | usu | |
| D-2020 | [GalNAc3]susgagcuauGfuGfUfUf | 3004 | asCfsacuuCfcaacAfcAfuagcucas | 3258 |
| | Gfgaagugs{invAb} | | usu | |
| D-2021 | [GalNAc3]susuuggaauUfcUfUfUf | 3005 | asGfsuagaGfcaaaGfaAfuuccaaas | 3259 |
| | Gfcucuacs{invAb} | | usu | |
| D-2022 | [GalNAc3]sasguuuggaAfuUfCfUf | 3006 | usAfsgagcAfaagaAfuUfccaaacus | 3260 |
| | Ufugcucus{invAb} | | usu | |
| D-2023 | [GalNAc3]susugcuauaAfuUfUfCf | 3007 | asAfscuccUfugaaAfuUfauagcaas | 3261 |
| | Afaggagus{invAb} | | usu | |
| D-2024 | [GalNAc3]sauccggAfaGfUfUfUfg | 3008 | usCfsuaucuucaaAfcUfuCfcggaus | 3262 |
| | aagauags{invAb} | | usu | |
| D-2025 | [GalNAc3]sccggAfaGfUfUfUfgaa | 3009 | usCfsuaucUfucaaacUfuCfcggsus | 3263 |
| | gauagasus{invAb} | | u | |
| D-2026 | [GalNAc3]sccggAfaGfUfUfUfgaa | 3010 | usCfsuaucUfucaaAfcUfuCfcggsu | 3264 |
| | gauagasus{invAb} | | su | |
| D-2027 | [GalNAc3]sccggaaGfuUfUfGfAfa | 3011 | usCfsuaucUfucaaAfcUfuCfcggsu | 3265 |
| | gauagasus{invAb} | | su | |
| D-2028 | [GalNAc3]scscggAfaGfUfUfUfga | 3012 | usCfsuaucUfucaaAfcUfuCfcggsu | 3266 |
| | agauagasus{invAb} | | su | |
| D-2029 | [GalNAc3]sasusccggAfaGfUfUfU | 3013 | usCfsuaucUfuCfaaacUfuCfcggau | 3267 |
| | fgaagauasgs{invAb} | | susu | |
| D-2030 | [GalNAc3]sasuccggAfaGfUfUfUf | 3014 | usCfsuaucUfucaaacUfuCfcggaus | 3268 |
| | gaagauags{invAb} | | usu | |
| D-2031 | [GalNAc3]scscggaaGfuUfUfGfAf | 3015 | usCfsuaucUfucaaAfcUfuCfcggsu | 3269 |
| | agauagasus{invAb} | | su | |
| D-2032 | [GalNAc3]scscggAfaGfUfUfUfga | 3016 | usCfsuaucUfucaaacUfuCfcggsus | 3270 |
| | agauagasus{invAb} | | u | |
| D-2033 | [GalNAc3]scscggaaGfuUfUfGfAf | 3017 | usCfsuaucUfucAfaAfcUfuccggsu | 3271 |
| | agauagasus{invAb} | | su | |
| D-2034 | [GalNAc3]sasuccggaaGfuUfUfGf | 3018 | usCfsuaucUfucaaAfcUfuccggaus | 3272 |
| | Afagauags{invAb} | | usu | |
| D-2035 | {DCA- | 3019 | asGfsgucaUfuUfguccAfuUfucaga | 3273 |
| | sC6}uscsugaaAfuGfGfAfCfaaaug | | susu | |
| | acscs{invAb} | | | |
| D-2036 | [GalNAc3]scsacaaagaCfgGfUfAf | 3020 | asGfsauuaUfguacCfgUfcuuugugs | 3274 |
| | Cfauaaucs{invAb} | | usu | |
| D-2037 | [GalNAc3]sascaaagacGfgUfAfCf | 3021 | asGfsgauuAfuguaCfcGfucuuugus | 3275 |
| | Afuaauccs{invAb} | | usu | |
| D-2038 | [GalNAc3]scsaaagacgGfuAfCfAf | 3022 | usAfsggauUfauguAfcCfgucuuugs | 3276 |
| | Ufaauccus{invAb} | | usu | |
| D-2039 | [GalNAc3]sasaagacggUfaCfAfUf | 3023 | asUfsaggaUfuaugUfaCfcgucuuus | 3277 |
| | Afauccuas{invAb} | | usu | |
| D-2040 | [GalNAc3]susaguuuggAfaUfUfCf | 3024 | asGfsagcaAfagaaUfuCfcaaacuas | 3278 |
| | Ufuugcucs{invAb} | | usu | |
| D-2041 | [GalNAc3]scsuguguGfgCfCfAfAf | 3025 | asUfsuauaAfuuGfgccAfcAfcagsu | 3279 |
| | uuauaausus{invAb} | | su | |
| D-2042 | [GalNAc3]sgscacauUfuGfUfUfUf | 3026 | usAfsgucuUfaaAfcaaAfuGfugcsu | 3280 |
| | aagacuasus{invAb} | | su | |
| D-2043 | [GalNAc3]susggaauUfcUfUfUfGf | 3027 | asGfsuagaGfcaAfagaAfuUfccasu | 3281 |
| | cucuacusus{invAb} | | su | |
| D-2044 | [GalNAc3]susuuggaAfuUfCfUfUf | 3028 | usAfsgagcAfaaGfaauUfcCfaaasu | 3282 |
| | ugcucuasus{invAb} | | su | |
| D-2045 | [GalNAc3]scsuguguGfgCfCfAfAf | 3029 | asUfsuauaAfuuggccAfcAfcagsus | 3283 |
| | uuauaausus{invAb} | | u | |
| D-2046 | [GalNAc3]sgscacauUfuGfUfUfUf | 3030 | usAfsgucuUfaaacaaAfuGfugcsus | 3284 |
| | aagacuasus{invAb} | | u | |
| D-2047 | [GalNAc3]susggaauUfcUfUfUfGf | 3031 | asGfsuagaGfcaaagaAfuUfccasus | 3285 |
| | cucuacusus{invAb} | | u | |
| D-2048 | [GalNAc3]susuuggaAfuUfCfUfUf | 3032 | usAfsgagcAfaagaauUfcCfaaasus | 3286 |
| | ugcucuasus{invAb} | | u | |
| D-2049 | [GalNAc3]sgsacgguAfcAfUfAfAf | 3033 | usGfsuaggAfuuauguAfcCfgucsus | 3287 |
| | uccuacasus{invAb} | | u | |
| D-2050 | [GalNAc3]scsuguGfuGfGfCfCfaa | 3034 | asUfsuauaAfuUfggccAfcAfcagsu | 3288 |
| | uuauaausus{invAb} | | su | |
| D-2051 | [GalNAc3]sgscacAfuUfUfGfUfuu | 3035 | usAfsgucuUfaAfacaaAfuGfugcsu | 3289 |
| | aagacuasus{invAb} | | su | |
| D-2052 | [GalNAc3]susggaAfuUfCfUfUfug | 3036 | asGfsuagaGfcAfaagaAfuUfccasu | 3290 |
| | cucuacusus{invAb} | | su | |
| D-2053 | [GalNAc3]susuugGfaAfUfUfCfuu | 3037 | usAfsgagcAfaAfgaauUfcCfaaasu | 3291 |
| | ugcucuasus{invAb} | | su | |
| D-2054 | [GalNAc3]sgsacgGfuAfCfAfUfaa | 3038 | usGfsuaggAfuUfauguAfcCfgucsu | 3292 |
| | uccuacasus{invAb} | | su | |
| D-2055 | [GalNAc3]suscugaaauGfgAfCfAf | 3039 | asGfsgucaUfuuguCfcAfuuucagas | 3293 |
| | Afaugaccs{invAb} | | usu | |
| D-2056 | [GalNAc3]susgaaAfuGfGfAfCfaa | 3040 | asGfsgucaUfuuguCfcAfuUfucasu | 3294 |
| | augaccusus{invAb} | | su | |
| D-2057 | [GalNAc3]susgcuguguGfgCfCfAf | 3041 | asUfsuauaAfuuggCfcAfcacagcas | 3295 |
| | Afuuauaas{invAb} | | usu | |
| D-2058 | [GalNAc3]scsuguGfuGfGfCfCfaa | 3042 | asUfsuauaAfuuggCfcAfcAfcagsu | 3296 |
| | uuauaausus{invAb} | | su | |
| D-2059 | [GalNAc3]susgcuguGfuGfGfCfCf | 3043 | asUfsuauaAfuuggccAfcAfcagcas | 3297 |
| | aauuauaas{invAb} | | usu | |
| D-2060 | [GalNAc3]scsuguguGfgCfCfAfAf | 3044 | asUfsuauaAfuuggCfcAfcAfcagsu | 3298 |
| | uuauaausus{invAb} | | su | |
| D-2061 | [GalNAc3]scsuguguGfgCfCfAfAf | 3045 | asUfsuauaAfuuGfgCfcAfcacagsu | 3299 |
| | uuauaausus{invAb} | | su | |
| D-2062 | [GalNAc3]scsccucguaUfgUfUfUf | 3046 | asAfscuuuCfaaaaCfaUfacgagggs | 3300 |
| | Ufgaaagus{invAb} | | usu | |
| D-2063 | [GalNAc3]scsucgUfaUfGfUfUfuu | 3047 | asAfscuuuCfaaaaCfaUfaCfgagsu | 3301 |
| | gaaaguusus{invAb} | | su | |
| D-2064 | [GalNAc3]scscaaugggAfuUfUfAf | 3048 | usGfsuugcUfguaaAfuCfccauuggs | 3302 |
| | Cfagcaacs{invAb} | | usu | |
| D-2065 | [GalNAc3]sasaugGfgAfUfUfUfac | 3049 | usGfsuugcUfguaaAfuCfcCfauusu | 3303 |
| | agcaacasus{invAb} | | su | |
| D-2066 | [GalNAc3]scscaaugGfgAfUfUfUf | 3050 | usGfsuugcUfguaaauCfcCfauuggs | 3304 |
| | acagcaacs{invAb} | | usu | |
| D-2067 | [GalNAc3]sasaugggAfuUfUfAfCf | 3051 | usGfsuugcUfguaaAfuCfcCfauusu | 3305 |
| | agcaacasus{invAb} | | su | |
| D-2068 | [GalNAc3]sasaugggAfuUfUfAfCf | 3052 | usGfsuugcUfguAfaAfuCfccauusu | 3306 |
| | agcaacasus{invAb} | | su | |
| D-2069 | [GalNAc3]sgsuuugcucUfuAfAfUf | 3053 | usCfscauaCfgauuAfaGfagcaaacs | 3307 |
| | Cfguauggs{invAb} | | usu | |
| D-2070 | [GalNAc3]susugcUfcUfUfAfAfuc | 305 | usCfscauaCfgauuAfaGfaGfcaasu | 3308 |
| | guauggasus{invAb} | | su | |
| D-2071 | [GalNAc3]sgsuuugcUfcUfUfAfAf | 3055 | usCfscauaCfgauuaaGfaGfcaaacs | 3309 |
| | ucguauggs{invAb} | | usu | |
| D-2072 | [GalNAc3]susugcucUfuAfAfUfCf | 3056 | usCfscauaCfgauuAfaGfaGfcaasu | 3310 |
| | guauggasus{invAb} | | su | |
| D-2073 | [GalNAc3]susugcUfcUfUfAfAfuc | 3057 | usCfscauaCfgauuaaGfaGfcaasus | 3311 |
| | guauggasus{invAb} | | u | |
| D-2074 | [GalNAc3]susugcucUfuAfAfUfCf | 3058 | usCfscauaCfgaUfuAfaGfagcaasu | 3312 |
| | guauggasus{invAb} | | su | |
| D-2075 | [GalNAc3]sasaucagauCfaUfUfAf | 3059 | asUfsaacuGfguaaUfgAfucugauus | 3313 |
| | Cfcaguuas{invAb} | | usu | |
| D-2076 | [GalNAc3]suscagaucaUfuAfCfCf | 3060 | asGfscuaaCfugguAfaUfgaucugas | 3314 |
| | Afguuagcs{invAb} | | usu | |
| D-2077 | [GalNAc3]suscagAfuCfAfUfUfac | 3061 | asUfsaacuGfguaaUfgAfuCfugasu | 3315 |
| | caguuausus{invAb} | | su | |
| D-2078 | [GalNAc3]sasgauCfaUfUfAfCfca | 3062 | asGfscuaaCfugguAfaUfgAfucusu | 3316 |
| | guuagcusus{invAb} | | su | |
| D-2079 | [GalNAc3]sgscacAfuUfUfGfUfuu | 3063 | usAfsgucuUfaaacAfaAfuGfugcsu | 3317 |
| | aagacuasus{invAb} | | su | |
| D-2080 | [GalNAc3]sasagcacAfuUfUfGfUf | 3064 | usAfsgucuUfaaacaaAfuGfugcuus | 3318 |
| | uuaagacus{invAb} | | usu | |
| D-2081 | [GalNAc3]sgscacauUfuGfUfUfUf | 3065 | usAfsgucuUfaaacAfaAfuGfugcsu | 3319 |
| | aagacuasus{invAb} | | su | |
| D-2082 | [GalNAc3]sgscacAfuUfUfGfUfuu | 3066 | usAfsgucuUfaaacaaAfuGfugcsus | 3320 |
| | aagacuasus{invAb} | | u | |
| D-2083 | [GalNAc3]sgscacauUfuGfUfUfUf | 3067 | usAfsgucuUfaaAfcAfaAfugugcsu | 3321 |
| | aagacuasus{invAb} | | su | |
| D-2084 | [GalNAc3]sgscacauuuGfuUfUfAf | 3068 | asAfsuaguCfuuaaAfcAfaaugugcs | 3322 |
| | Afgacuaus{invAb} | | usu | |
| D-2085 | {DCA- | 3069 | asUfsuauaAfuuggccAfcAfcagsus | 3323 |
| | sC6}cuguGfuGfGfCfCfaauuauaau | | u | |
| | sus{invAb} | | | |
| D-2086 | [GalNAc3]sgaaucaAfgAfUfGfGfu | 3070 | asUfscuucAfccauCfuUfgauucscs | 3324 |
| | gaagsas{invAb} | | u | |
| D-2087 | {DCA- | 3071 | asUfscuucAfccauCfuUfgauucscs | 3325 |
| | sC6}gaaucaAfgAfUfGfGfugaagsa | | u | |
| | s{invAb} | | | |
| D-2088 | {DCA- | 3072 | usCfscauaCfgauuaaGfaGfcaaacs | 3326 |
| | sC6}guuugcUfcUfUfAfAfucguaug | | usu | |
| | gs{invAb} | | | |
| D-2089 | {DCA- | 3073 | asAfscuuUfCfaaaacaUfaCfgaggg | 3327 |
| | sC6}cccucgUfaUfGfUfUfuugaaag | | susu | |
| | us{invAb} | | | |
| D-2090 | [GalNAc3]sgsacgguAfcAfUfAfAf | 3074 | usGfsuaggAfuuAfuguAfcCfgucsu | 3328 |
| | uccuacasus{invAb} | | su | |
| D-2091 | [GalNAc3]scsuguGfuGfGfCfCfaa | 3075 | asUfsuauaAfuuggccAfcAfcagsus | 3329 |
| | uuauaausus{invAb} | | u | |
| D-2092 | [GalNAc3]sasaugGfgAfUfUfUfac | 3076 | usGfsuugcUfguaaauCfcCfauusus | 3330 |
| | agcaacasus{invAb} | | u | |
| D-2093 | [GalNAc3]sasagcacauUfuGfUfUf | 3077 | usAfsgucuUfaaacAfaAfugugcuus | 3331 |
| | Ufaagacus{invAb} | | usu | |
| D-2094 | csgsaagaCfaGfCfGfAfccccaugcs | 3078 | asGfscaugGfggucgcUfgUfcuucgs | 3332 |
| | {invAb} | | usu | |
| D-2095 | csasuggaCfgGfCfCfGfguaacaaas | 3079 | asUfsuuguUfaccggcCfgUfccaugs | 3333 |
| | {invAb} | | usu | |
| D-2096 | usgscacaUfgCfGfCfAfcgcgcaugs | 3080 | asCfsaugcGfcgugcgCfaUfgugcas | 3334 |
| | {invAb} | | usu | |
| D-2097 | gscsacauGfcGfCfAfCfgcgcaugcs | 3081 | usGfscaugCfgcgugcGfcAfugugcs | 3335 |
| | {invAb} | | usu | |
| D-2098 | csascaugCfgCfAfCfGfcgcaugcas | 3082 | asUfsgcauGfcgcgugCfgCfaugugs | 3336 |
| | {invAb} | | usu | |
| D-2099 | ascsaugcGfcAfCfGfCfgcaugcacs | 3083 | asGfsugcaUfgcgcguGfcGfcaugus | 3337 |
| | {invAb} | | usu | |
| D-2100 | uscsugcaCfuAfAfAfAfuccccaaas | 3084 | asUfsuuggGfgauuuuAfgUfgcagas | 3338 |
| | {invAb} | | usu | |

[0194] The methods below were applied to synthesize and purify the RNAi constructs identified in Table 1 and Table 2.

### Synthesis

[0195] RNAi constructs were synthesized using solid phase phosphoramidite chemistry. Synthesis was performed on a MerMade synthesizer (Bioautomation). Various chemical modifications, including 2′-fluoro modified nucleotides, 2′-O-methyl modified nucleotides, inverted abasic nucleotides, and phosphorothioate internucleotide linkages, were incorporated into the molecules. The RNAi constructs were generally formatted to be duplexes of 19-21 base pairs when annealed with either no overhangs (double bluntmer) or one or two overhangs of 2 nucleotides at the 3′ end of the antisense strand and/or the sense strand. For in vivo studies, the sense strands of the RNAi constructs were conjugated to either a trivalent N-acetyl-galactosamine (GalNAc) moiety or a hydrophobic moiety (e.g., palmitic acid or docosanoic acid) as described further below.

[0196] The materials used in the synthesis of RNAi constructs included:
[0197] Acetonitrile (DNA Synthesis Grade, AX0152-2505, EMD)
[0198] Capping Reagent A (80:10:10 (v/v/v) tetrahydrofuran/lutidine/acetic anhydride, BIO221/4000, EMD)
[0199] Capping Reagent B (16% 1-methylimidazole/tetrahydrofuran, BIO345/4000, EMD)
[0200] Activator Solution (0.25 M 5-(ethylthio)-1H-tetrazole (ETT) in acetonitrile, BIO152/0960, EMD)
[0201] Detritylation Reagent (3% dichloroacetic acid in dichloromethane, BIO830/4000, EMD)
[0202] Oxidation Reagent (0.02 M iodine in 70:20:10 (v/v/v) tetrahydrofuran/pyridine/water, BIO420/4000, EMD)
[0203] Diethylamine solution (20% DEA in acetonitrile, NC0017-0505, EMD)
[0204] Thiolation Reagent (0.05 M 5-N-[(dimethylamino)methylene]amino-3H-1,2,4-dithiazole-3-thione (BIOSULII/160K) in pyridine)
[0205] 5′-Aminohexyl linker phosphoramidite and 2′-methoxy and 2′-fluoro phosphoramidites of adenosine, guanosine, and cytosine (Thermo Fisher Scientific), 0.10 M in acetonitrile over Molecular Trap Packs (0.5 g per 30 mL, Bioautomation)
[0206] 2′-methoxy-uridine phosphoramidite (Thermo Fisher Scientific), 0.10 M in 90:10 (v/v) acetonitrile/DMF over Molecular Trap Packs (0.5 g per 30 mL, Bioautomation)
[0207] 2′-deoxy-reverse absaic phosphoramidite (ChemGenes), 0.10 M in acetonitrile over Molecular Trap Packs (0.5 g per 30 mL, Bioautomation)
[0208] CPG Support (Hi-Load Universal Support, 500A (BH5-3500-G1), 79.6 μmol/g, 0.126 g (10 μmol)) or 1 μmol Universal Synthesis Column, 500A, Pipette Style Body (MM5-3500-1, Bioautomation)
[0209] Ammonium hydroxide (concentrated, J. T. Baker)

[0210] Reagent solutions, phosphoramidite solutions, and solvents were attached to the MerMade instrument. The columns containing solid support (BioAutomation, Universal Support, 500 Å) were affixed to the instrument and washed with acetonitrile. The synthesis was started using the Poseidon software. The phosphoramidite and reagent solution lines were purged. The synthesis was accomplished by repetition of the deprotection/coupling/capping/oxidation/capping synthesis cycle. To the solid support was added detritylation reagent to remove the 5′-dimethoxytrityl (DMT) protecting group. The solid support was washed with acetonitrile. To the support was added phosphoramidite (4 eq.) and activator solution (20 eq.) to couple the incoming nucleotide to the free 5′-hydroxyl group. The coupling reaction (6 min) was repeated twice. The support was washed with acetonitrile and then added capping reagents A and B to terminate any unreacted oligonucleotide chains. The support was washed with acetonitrile. To the support was added oxidation or thiolation reagent to convert the phosphite triester to the phosphate triester or phosphorothioate. The oxidation reaction was increased from 3 to 5 min. To the support was added capping reagents A and B to dehydrate the support and terminate any unreacted oligonucleotide chains. The solid support was washed with acetonitrile. After the final reaction cycle, the resin was first treated with diethylamine solution to remove the 2-cyanoethyl protecting groups from the phosphate backbone. The support was washed with acetonitrile and the DMT group removed from antisense strands. The 5′ termini of sense strands were left 5′-monomethoxytrityl (MMT) protected.

### Analysis of Crude Synthesized RNAi Constructs

[0211] Crude samples were prepared for ion-pairing (IP)-LCMS by making 20-fold dilutions into water (1004 final volume). Samples were analyzed by ion-pairing (IP)-LCMS on an Agilent 1290 analytical HPLC. Samples were eluted from a Waters Xbridge BEH OST C18 column (1.7 um, 2.1×50 mm) using a linear gradient of acetonitrile in 15.7 mM DIEA/50 mM HFIP over 3.5 min with a flowrate of 400 μL/min.

### Conjugation

[0212] To facilitate on-resin acylation or conjugation to GalNAc, the MMT group was removed by addition of deprotection solution consisting of trifluoroacetic acid with triisopropylsilane (2% each, v/v) in dichloromethane (DCM). The mixture was gently stirred and let stand for approximately 2-5 min. The mixture was initially gravity filtered until the solution no longer drained then filtered under vacuum. The process repeated 5-10 times until the filtrate was no longer colored. The resin was washed with DCM, neutralized with 5% DIEA in DCM (2×2 min), and washed again with DCM.

[0213] When conjugation to docosanoic acid (C22) was desired, docosanoic acid (10 molar equivalents relative to the resin) was dissolved in DCM (70 mM, 34.1 mg, 100 μmol, TCI) and TATU (500 mM DMSO) (32.2 mg, 100 μmol, ChemPep) was added (10 eq) followed by DIEA (500 mM DCM) (25.24 mg, 200 μmol, Aldrich) (20 eq). The solution was mixed and let stand to pre-activate for 5-10 min. The activated ester was added to the oligo-resin and the reaction vessels sealed. The reaction vessels were placed on a vortex mixer at 700 RPM for 14h at room temperature. The solution was drained, and the resin washed with DMF and DCM.

[0214] When conjugation to a palmitoyl group was desired, palmitic acid (10 molar equivalents relative to the resin) was dissolved in DCM (300 mM, 25.64 mg, 100 μmol, Aldrich) was transferred to a polypropylene tube (10 molar equivalents relative to the resin) and TATU (500 mM DMSO) (32.2 mg, 100 μmol, ChemPep) was added (10 eq) followed by DIEA (500 mM DCM) (25.24 mg, 200 μmol, Aldrich) (20 eq). The solution was mixed and let stand to pre-activate for 5-10 min. The activated ester was added to the oligo-resin and the reaction vessels sealed. The reaction vessels were placed on a vortex mixer at 700 RPM for 14h at room temperature. The solution was drained, and the resin washed with DMF and DCM.

[0215] When conjugation to GalNAc was desired, a solution of GalNAc3-Lys2-Ahx (67 mg, 40 μmol) in DMF (0.5 mL) was prepared in a separate vial. GalNAc3-Lys2-Ahx, which has the structure shown as Formula VII below, was prepared with 1,1,3,3-tetramethyluronium tetrafluoroborate (TATU, 12.83 mg, 40 μmol) and diisopropylethylamine (DIEA, 13.9 μL, 80 μmol). The activated coupling solution was added to the resin, and the column was capped and incubated at room temperature overnight. The resin was washed with DMF, DCM, and dried under vacuum.

[chemical structure]

[0216] In Formula VII, X═O or S. The squiggly line represents the point of attachment to the 5′ terminal nucleotide of the sense strand of the RNAi construct. The GalNAc moiety was attached to the 5′ carbon of the 5′ terminal nucleotide of the sense strand except where an inverted abasic (invAb) deoxynucleotide was the 5′ terminal nucleotide and linked to the adjacent nucleotide via a 5′-5′ internucleotide linkage, in which case the GalNAc moiety was attached to the 3′ carbon of the inverted abasic deoxynucleotide.

Cleavage from Resin

[0217] The columns were placed in a cleavage chuck and to the columns was added 1.2 mL of a solution containing 20% ethanol in concentrated ammonium hydroxide (1:4 v/v). The solvent was allowed to gravity drain through the solid support and filtrates collected into a 24 well plate. The cleavage process was repeated 3 times and the filtrates combined. The plate was sealed in a deprotection chuck and placed in an incubator at 55° C. and let mix at 200 RPM for 20 h. The chuck/plate were let cool to room temperature and samples were taken for LCMS. The plate was placed in a Genevac HT4X and the samples concentrated for 2 hr leaving approximately 2 mL of concentrate

### RP-HPLC Purification of Lipid-Conjugated Oligos

[0218] The crude oligo was purified by RP-HPLC using a Phenomenex Oligo-RP C18 column (Sum, 10×250 mm) with a flowrate of 6 mL/min. The mobile phase consisted of 0.02M ammonium bicarbonate with 5% acetonitrile (Buffer-A) & 75% acetonitrile (Buffer-B). The fractions were pooled for desalt as described below.

### Anion Exchange Purification of Oligos

[0219] The antisense and GalNAc-conjugated sense strands were purified by anion exchange (AEX) chromatography. Oligos were eluted from a two Tosoh TSK Gel SuperQ-5PW columns in series (21×150 mm, 13 um) with a flowrate of 8 mL/min. using a linear gradient of 1 M sodium bromide in 20 mM sodium phosphate, 15% acetonitrile, pH 8.5. Samples were desalted and UV quantified as described below.

### Desalt

[0220] The pooled fractions were desalted by size exclusion chromatography on a GE Akta Pure using a GE Hi-Prep 26/10 column and 19.9% EtOH mobile phase. Desalted samples were analyzed by IP-LCMS, quantified by UV (Nanodrop), and lyophilized in a Genevac S3-HT12.

### Final QC

[0221] Samples were analyzed by ion-pairing (IP)-LCMS on an Agilent 1290 analytical HPLC. Samples were eluted from a Waters Xbridge BEH OST C18 column (1.7 um, 2.1×50 mm) using a linear gradient of acetonitrile in 15.7 mM DIEA/50 mM HFIP over 6.5 min. with a flowrate of 400 μL/min.

### Annealing

[0222] Single strands were reconstituted in PBS at 2 mM and quantified by UV. Single strands were diluted to 1 mM in PBS and equal volumes combined to anneal the corresponding duplex. The duplex was annealed at 90° C. for 5 min and allowed to cool to room temp. Duplex formation was monitored by analytical AEX and single strands titrated as necessary.

### Example 4: In Vitro Evaluation of FAM13A siRNA Molecules in a Cell-Based Assay

[0223] A panel of fully chemically modified siRNAs from Example 3 were prepared and tested for potency and selectivity of FAM13A mRNA knockdown in vitro. Each siRNA duplex consisted of two strands, the sense or ‘passenger’ strand and the antisense or ‘guide’ strand.

[0224] RNA FISH (fluorescence in situ hybridization) assay was carried out to measure FAM13A mRNA knockdown by test siRNAs. HUH-7 cells (Sekisui Xenotech JCRB0403) were cultured in Eagle's Minimum Essential Medium (EMEM) (ATCC® 30-2003™) supplemented with 10% fetal bovine serum (FBS, Sigma) and 1% penicillin-streptomycin (P-S, Corning). siRNAs were transfected into cells by reverse transfection using Lipofectamine RNAiMAX transfection reagent (Thermo Fisher Scientific). 1 μL of test siRNAs (in 10 data points for dose with 1:3 dilution starting at 500 nM final concentration) or phosphate-buffered saline (PBS) vehicle and 4 μL of plain EMEM without supplements were added to PDL-coated CellCarrier-384 Ultra assay plates (PerkinElmer) by a Bravo automated liquid handling platform (Agilent). 5 μL of Lipofectamine RNAiMAX (Thermo Fisher Scientific), pre-diluted in plain EMEM without supplements (0.06 μL of RNAiMAX in 5 μL EMEM), was then dispensed into the assay plates by a Multidrop Combi reagent dispenser (Thermo Fisher Scientific). After 20-minute incubation of the siRNA/RNAiMAX mixture at room temperature (RT), 30 μL of HepG2 cells (2000 cells per well) in EMEM supplemented with 10% FBS and 1% P-S were added to the transfection complex using a Multidrop Combi reagent dispenser. The assay plates were incubated at RT for 20 mins prior to being placed in an incubator. Cells were incubated for 72 hrs. at 37° C. and 5% CO₂.

[0225] The RNA FISH assay was performed 72 hours after siRNA transfection, using the manufacturer's assay reagents and protocol (QuantiGene® ViewRNA HC Screening Assay from Thermo Fisher Scientific) on an in-house assembled automated FISH assay platform. In brief, cells were fixed in 4% formaldehyde (Thermo Fisher Scientific) for 15 mins at RT, permeabilized with detergent for 3 mins at RT and then treated with protease solution for 10 mins at RT. Target-specific probes (ThermoFisher VA6-3175340-VC) or vehicle (target probe diluent without target probes as negative control) were incubated for 3 hours, whereas preamplifiers, amplifiers, and label probes were incubated for 1 hour each. All hybridization steps were carried out at 40° C. in a Cytomat 2 C-LIN automated incubator (Thermo Fisher Scientific).

[0226] After hybridization reactions, cells were stained for 30 mins with Hoechst and CellMask Blue (Thermo Fisher Scientific) and then imaged on an Opera Phenix high-content screening system (PerkinElmer). The images were analyzed using a Columbus image data storage and analysis system (PerkinElmer) to obtain the mean spot count per cell. The mean spot count per cell was normalized using the high (PBS with target probes) and low (PBS without target probes) control wells. The high and low controls have normalized values of 100 and 0, respectively. The normalized values against the test siRNA concentrations were fitted to a 4-parameter sigmoidal model using Genedata Screener data analysis software (Genedata, Basel, Switzerland) to obtain IC50 values and maximum activity.

[0227] To verify and compare results, some of the siRNA duplexes were analyzed more than once using the above assay.

[0228] The results of the assays are shown in Table 3. FAM13A knockdown provides a percentage of knockdown compared to control samples. Where an siRNA duplex was tested more than once, each test is shown as a separate row in Table 3 as different “runs” of the assay. Negative values indicate a decrease in FAM13A mRNA levels. Undefined means the Genedata Screener software could not fit a curve.

TABLE 3
In vitro inhibition of human FAM13A mRNA in Hep3B cells

| Duplex No. | Run No. | IC50 (nM) | Max FAM13A knockdown (%) |
|---|---|---|---|
| 1001 | | 5.74 | −49.1 |
| 1002 | | 5.95 | −46.1 |
| 1003 | | >500 | −40.0 |
| 1004 | | 3.49 | −38.7 |
| 1005 | Run 1 | Undefined | −33.0 |
| 1005 | Run 2 | 6.51 | −43.9 |
| 1005 | Run 3 | 1.97 | −50.6 |
| 1006 | | >500 | −1.6 |
| 1007 | | 2.4 | −53.3 |
| 1008 | | 1.36 | −52.7 |
| 1009 | | >500 | −15.3 |
| 1010 | | 16.5 | −65.7 |
| 1011 | | 5.85 | −65.5 |
| 1012 | | 13 | −51.9 |
| 1013 | Run 1 | 5.44 | −67.8 |
| 1013 | Run 2 | 4.93 | −63.9 |
| 1014 | | 4.4 | −72.9 |
| 1015 | | 3.99 | −74.7 |
| 1016 | | 2.33 | −67.0 |
| 1017 | | 3.34 | −75.8 |
| 1018 | | 6.84 | −31.9 |
| 1019 | | 2.59 | −78.9 |
| 1020 | | 5.91 | −81.0 |
| 1021 | | 4.43 | −52.3 |
| 1022 | | 5.48 | −70.1 |
| 1023 | | 4.08 | −80.3 |
| 1024 | | 2.47 | −77.4 |
| 1025 | | 6.26 | −81.4 |
| 1026 | | Undefined | −38.7 |
| 1027 | | >500 | −2.1 |
| 1028 | | 3.77 | −81.2 |
| 1029 | | 3.51 | −70.5 |
| 1030 | | 16 | −50.6 |
| 1031 | | 2.67 | −43.7 |
| 1032 | | >500 | −25.7 |
| 1033 | | Undefined | −37.0 |
| 1034 | | 3.92 | −74.3 |
| 1035 | Run 1 | 1.95 | −41.4 |
| 1035 | Run 2 | 9.61 | −31.8 |
| 1036 | | Undefined | −39.3 |
| 1037 | | 1.23 | −77.7 |
| 1038 | Run 1 | 4.72 | −80.8 |
| 1038 | Run 2 | 6.55 | −76.5 |
| 1038 | Run 3 | 4.56 | −71.9 |
| 1039 | | 14.1 | −69.2 |
| 1040 | | 2.55 | −82.9 |
| 1041 | | 3.91 | −71.3 |
| 1042 | | 8.71 | −72.6 |
| 1043 | | 2.46 | −78.6 |
| 1044 | | 4.49 | −77.6 |
| 1045 | | 1.47 | −79.6 |
| 1046 | | 5.89 | −65.6 |
| 1047 | | 6.16 | −73.2 |
| 1048 | | 4.7 | −69.8 |
| 1049 | | 6.59 | −76.0 |
| 1050 | | 5.19 | −86.4 |
| 1051 | | 6.74 | −68.7 |
| 1052 | | 3.77 | −69.5 |
| 1053 | | 18.9 | −62.2 |
| 1054 | | 5.86 | −72.6 |
| 1055 | | Undefined | −60.1 |
| 1056 | | 5.25 | −55.4 |
| 1057 | | 4.01 | −76.3 |
| 1058 | | 4.31 | −74.9 |
| 1059 | | 10.5 | −71.2 |
| 1060 | | 4.44 | −65.1 |
| 1061 | | 11.2 | −82.2 |
| 1062 | | 5.75 | −95.0 |
| 1063 | | 16.5 | −68.1 |
| 1064 | | 11.3 | −56.1 |
| 1065 | | 7.73 | −55.6 |
| 1066 | | >500 | −18.5 |
| 1067 | | 4.9 | −68.4 |
| 1068 | | Undefined | −36.8 |
| 1069 | | 20.2 | −72.1 |
| 1070 | | 3.7 | −84.3 |
| 1071 | | 2.78 | −52.0 |
| 1072 | | 2.72 | −75.8 |
| 1073 | | >500 | −9.7 |
| 1074 | | 4.12 | −76.3 |
| 1075 | | 1.62 | −81.9 |
| 1076 | | 5.71 | −78.7 |
| 1077 | | 2.92 | −60.1 |
| 1078 | | 3.14 | −71.9 |
| 1079 | | 4.53 | −49.4 |
| 1080 | | 8.67 | −79.1 |
| 1081 | | 3.97 | −82.1 |
| 1082 | | 2.73 | −75.3 |
| 1083 | | 2.48 | −72.7 |
| 1084 | | 2.45 | −60.5 |
| 1085 | | 2.93 | −63.7 |
| 1086 | | 11.8 | −81.7 |
| 1087 | | 8.19 | −77.0 |
| 1088 | | Undefined | −28.5 |
| 1089 | | >500 | 4.8 |
| 1090 | | 3.22 | −75.1 |
| 1091 | | 3.5 | −82.7 |
| 1092 | | 2.81 | −70.1 |
| 1093 | | 7.01 | −66.3 |
| 1094 | Run 1 | 27.7 | −70.5 |
| 1094 | Run 2 | 28 | −80.9 |
| 1094 | Run 3 | 6.51 | −72.5 |
| 1095 | | 14.2 | −76.8 |
| 1096 | | 2.98 | −81.7 |
| 1097 | | 3.39 | −79.6 |
| 1098 | | 6.78 | −56.7 |
| 1099 | | >500 | −10.8 |
| 1100 | | 2.42 | −74.3 |
| 1101 | | 3.49 | −64.2 |
| 1102 | Run 1 | 19.9 | −54.2 |
| 1102 | Run 2 | 18.8 | −73.3 |
| 1102 | Run 3 | 26.2 | −70.0 |
| 1103 | | 8.52 | −59.5 |
| 1104 | | 5.59 | −79.1 |
| 1105 | | 6.73 | −38.8 |
| 1106 | | 3.44 | −44.4 |
| 1107 | | 6.25 | −88.4 |
| 1108 | | 17.6 | −42.5 |
| 1109 | | 2.7 | −44.7 |
| 1110 | | >500 | −23.1 |
| 1111 | | >500 | 28.7 |
| 1112 | | 4.27 | −49.4 |
| 1113 | | 4.03 | −54.1 |
| 1114 | | 5.59 | −79.4 |
| 1115 | | 15.8 | −76.0 |
| 1116 | | 6.72 | −70.9 |
| 1117 | | 52.3 | −48.3 |
| 1118 | Run 1 | 7.89 | −58.9 |
| 1118 | Run 2 | 1.42 | −46.1 |
| 1119 | | 5.51 | −78.9 |
| 1120 | | 4.28 | −39.5 |
| 1121 | | >500 | 0.0 |
| 1122 | | 3.2 | −74.3 |
| 1123 | | >18.5 | −24.6 |
| 1124 | | 2.95 | −80.7 |
| 1125 | | 8.53 | −37.6 |
| 1126 | | 1.86 | −85.5 |
| 1127 | | 3.94 | −82.0 |
| 1128 | | 2.92 | −83.9 |
| 1129 | | >500 | −20.2 |
| 1130 | | >500 | 7.8 |
| 1131 | | >500 | −22.7 |
| 1132 | | >500 | −0.8 |
| 1133 | | 1.36 | −38.9 |
| 1134 | | 28.9 | −55.7 |
| 1135 | | Undefined | −57.6 |
| 1136 | | >500 | −18.4 |
| 1137 | | >167 | −19.0 |
| 1138 | | 9.39 | −51.8 |
| 1139 | | >500 | −21.7 |
| 1140 | | 2.61 | −70.0 |
| 1141 | | 1.48 | −75.0 |
| 1142 | | 3.9 | −93.1 |
| 1143 | | 3.55 | −85.1 |
| 1144 | | 6.44 | −54.5 |
| 1145 | | 3.35 | −89.3 |
| 1146 | | 27.9 | −65.8 |
| 1147 | | 1.83 | −64.6 |
| 1148 | | 4.16 | −63.8 |
| 1149 | | 3.07 | −61.7 |
| 1150 | | 3.65 | −79.0 |
| 1151 | | 12.3 | −80.2 |
| 1152 | | 7.56 | −69.6 |
| 1153 | | 6.31 | −87.0 |
| 1154 | | 4.23 | −80.4 |
| 1155 | | 24.9 | −50.3 |
| 1156 | | 6.43 | −72.3 |
| 1157 | | >500 | 3.9 |
| 1158 | | 4.07 | −76.2 |
| 1159 | | 2.42 | −78.5 |
| 1160 | | 3.8 | −31.4 |
| 1161 | | 46.6 | −43.0 |
| 1162 | | Undefined | −39.5 |
| 1163 | | 6.17 | −70.2 |
| 1164 | | 20.5 | −65.9 |
| 1165 | | 19 | −56.7 |
| 1166 | Run 1 | 3.29 | −72.1 |
| 1166 | Run 2 | 3.27 | −75.1 |
| 1167 | | 3.88 | −79.2 |
| 1168 | | 18.2 | −58.5 |
| 1169 | | >500 | −15.2 |
| 1170 | | 8.32 | −58.4 |
| 1171 | | 1.71 | −84.5 |
| 1172 | | 5.3 | −90.7 |
| 1173 | | Undefined | −31.5 |
| 1174 | | 3.51 | −73.5 |
| 1175 | | 12.8 | −85.8 |
| 1176 | | >500 | 8.5 |
| 1177 | | >500 | 6.5 |
| 1178 | | >500 | 11.2 |
| 1179 | Run 1 | >500 | 11.6 |
| 1179 | Run 2 | Undefined | −34.1 |
| 1180 | | Undefined | −52.7 |
| 1181 | | 10.2 | −46.4 |
| 1182 | | 26.2 | −42.9 |
| 1183 | | 5.71 | −50.8 |
| 1184 | | >500 | 21.2 |
| 1185 | | 5.34 | −65.0 |
| 1186 | | 6.12 | −47.3 |
| 1187 | | 12.1 | −64.8 |
| 1188 | | 4.44 | −45.4 |
| 1189 | | 6.12 | −42.4 |
| 1190 | | 3.52 | −74.4 |
| 1191 | | 3.77 | −67.5 |
| 1192 | | >500 | 7.5 |
| 1193 | | 16.6 | −73.9 |
| 1194 | | 33.4 | −40.3 |
| 1195 | | 9.77 | −42.8 |
| 1196 | | >500 | −3.6 |
| 1197 | | 9.38 | −39.0 |
| 1198 | | 9.41 | −55.6 |
| 1199 | | 6.51 | −64.1 |
| 1200 | | >500 | −37.7 |
| 1201 | | >500 | −19.0 |
| 1202 | | >167 | −24.0 |
| 1203 | | 11.6 | −58.5 |
| 1204 | | 0.593 | −44.6 |
| 1205 | | 6.19 | −41.3 |
| 1206 | | 3.99 | −65.8 |
| 1207 | | 7.26 | −49.6 |
| 1208 | | 3.91 | −50.1 |
| 1209 | | 2.55 | −65.0 |
| 1210 | | 3.24 | −84.2 |
| 1211 | | 7.45 | −77.8 |
| 1212 | | 2.09 | −82.1 |
| 1213 | | 5.31 | −83.7 |
| 1214 | | 3.75 | −84.4 |
| 1215 | | 7.38 | −84.0 |
| 1216 | | 2.48 | −74.3 |
| 1217 | | 3.61 | −56.6 |
| 1218 | | 1.22 | −79.7 |
| 1219 | Run 1 | 5.07 | −93.2 |
| 1219 | Run 2 | 1.84 | −88.2 |
| 1219 | Run 3 | 11.1 | −87.5 |
| 1220 | | 3.89 | −88.0 |
| 1221 | | 1.97 | −89.0 |
| 1222 | | 12.9 | −80.1 |
| 1223 | | 57.4 | −31.0 |
| 1224 | | 2.42 | −94.2 |
| 1225 | | 3.62 | −85.0 |
| 1226 | | 3.12 | −87.7 |
| 1227 | | 1.62 | −71.5 |
| 1228 | | >500 | −29.3 |
| 1229 | | >500 | −10.4 |
| 1230 | | 5.23 | −37.0 |
| 1231 | | >500 | 8.4 |
| 1232 | | 1.35 | −78.4 |
| 1233 | | Undefined | −29.0 |
| 1234 | | 4.38 | −42.8 |
| 1235 | | 3.42 | −80.9 |
| 1236 | | 7.33 | −59.6 |
| 1237 | | 8.96 | −51.5 |
| 1238 | | 2.27 | −82.2 |
| 1239 | | 2.74 | −83.0 |
| 1240 | | 2.33 | −77.5 |
| 1241 | | 2.77 | −76.6 |
| 1242 | | 6.71 | −63.5 |
| 1243 | | 2.29 | −86.4 |
| 1244 | | 46.8 | −72.2 |
| 1245 | | 18 | −57.2 |
| 1246 | | >500 | 20.7 |
| 1247 | | >500 | −0.9 |
| 1248 | | >500 | −20.0 |
| 1249 | | 2.99 | −57.3 |
| 1250 | | 4.38 | −72.3 |
| 1251 | | 4.87 | −53.2 |
| 1252 | | 2.3 | −44.6 |
| 1253 | | 3.27 | −66.6 |
| 1254 | | Undefined | −53.4 |
| 1255 | | 3.68 | −51.2 |
| 1256 | | 3.2 | −57.2 |
| 1257 | | 21.6 | −57.7 |
| 1258 | | >500 | −15.1 |
| 1259 | | 9.5 | −76.0 |
| 1260 | | 2.47 | −67.7 |
| 1261 | | 2.41 | −63.4 |
| 1262 | | 12.3 | −78.3 |
| 1263 | | 11.7 | −83.0 |
| 1264 | | 2.02 | −77.8 |
| 1265 | | 6.7 | −62.0 |
| 1266 | | 3.99 | −70.0 |
| 1267 | | 5.48 | −69.7 |
| 1268 | | 4.6 | −55.0 |
| 1269 | | Undefined | −31.8 |
| 1270 | | 5.58 | −64.8 |
| 1271 | | 6.02 | −59.9 |
| 1272 | | 2.32 | −57.8 |
| 1273 | Run 1 | 5.34 | −78.2 |
| 1273 | Run 2 | 4.11 | −72.8 |
| 1274 | | 1.88 | −62.2 |
| 1275 | | 2.35 | −72.0 |
| 1276 | | 1.57 | −72.1 |
| 1277 | | 3.79 | −79.0 |
| 1278 | | 1.81 | −73.0 |
| 1279 | | 1.81 | −71.1 |
| 1280 | | 1.44 | −64.8 |
| 1281 | | 1.95 | −67.7 |
| 1282 | | 4.44 | −71.4 |
| 1283 | | 2.71 | −77.3 |
| 1284 | Run 1 | 3.55 | −67.3 |
| 1284 | Run 2 | 3.28 | −72.0 |
| 1285 | | 8.75 | −66.3 |
| 1286 | | 4.65 | −78.9 |
| 1287 | | 10.3 | −76.5 |
| 1288 | | 4.76 | −74.0 |
| 1289 | | 5.13 | −68.5 |
| 1290 | | >500 | −22.5 |
| 1291 | | 15.6 | −52.2 |
| 1292 | | 2.3 | −37.6 |
| 1293 | | 5.38 | −63.6 |
| 1294 | | >500 | −25.6 |
| 1295 | | 6.02 | −60.4 |
| 1296 | | 5.31 | −83.4 |
| 1297 | | 1.62 | −73.4 |
| 1298 | | Undefined | −30.6 |
| 1299 | | 2.32 | −63.6 |
| 1300 | | 1.19 | −54.6 |
| 1301 | | 1.78 | −64.7 |
| 1302 | | 4.79 | −55.9 |
| 1303 | | 1.83 | −57.3 |
| 1304 | | 9.89 | −75.5 |
| 1305 | | 4.19 | −69.5 |
| 1306 | | 3.65 | −74.3 |
| 1307 | | 12.6 | −55.7 |
| 1308 | | 12.6 | −61.5 |
| 1309 | | 2.83 | −50.6 |
| 1310 | | 4.94 | −55.4 |
| 1311 | | 1.74 | −50.9 |
| 1312 | | 4.25 | −58.2 |
| 1313 | | 5.44 | −71.6 |
| 1314 | | 2.28 | −78.4 |
| 1315 | | 3.42 | −73.2 |
| 1316 | | 8.48 | −43.1 |
| 1317 | | Undefined | −39.4 |
| 1318 | | 9.04 | −51.5 |
| 1319 | | 4.55 | −58.6 |
| 1320 | | 5.69 | −63.2 |
| 1321 | | Undefined | −37.6 |
| 1322 | | 4.82 | −56.4 |
| 1323 | Run 1 | Undefined | −49.9 |
| 1323 | Run 2 | >500 | −8.8 |
| 1324 | | 9.43 | −50.7 |
| 1325 | | 16.3 | −51.9 |
| 1326 | | 15.8 | −42.6 |
| 1327 | | 7.09 | −54.5 |
| 1328 | Run 1 | 22.5 | −63.9 |
| 1328 | Run 2 | 34.1 | −47.5 |
| 1329 | | >500 | 27.5 |
| 1330 | | 4.47 | −39.0 |
| 1331 | | 11.6 | −83.7 |
| 1332 | | 5.14 | −56.8 |
| 1333 | | 3.43 | −44.6 |
| 1334 | | 2.79 | −65.6 |
| 1335 | Run 1 | 5.17 | −55.2 |
| 1335 | Run 2 | 5.78 | −58.2 |
| 1336 | Run 1 | 5.63 | −54.8 |
| 1336 | Run 2 | Undefined | −50.7 |
| 1337 | | 13.9 | −68.8 |
| 1338 | | 13 | −61.6 |
| 1339 | | 12.7 | −66.6 |
| 1340 | | 2.85 | −68.3 |
| 1341 | Run 1 | 3.41 | −68.1 |
| 1341 | Run 2 | 1.97 | −64.3 |
| 1342 | Run 1 | 0.113 | −76.1 |
| 1342 | Run 2 | 3.75 | −81.6 |
| 1343 | | 3.08 | −78.4 |
| 1344 | | 14.1 | −87.2 |
| 1345 | | 2.92 | −84.4 |
| 1346 | | 9.04 | −84.3 |
| 1347 | | 6.71 | −75.3 |
| 1348 | | 11.4 | −75.0 |
| 1349 | | 8.35 | −57.0 |
| 1350 | Run 1 | 9.86 | −79.2 |
| 1350 | Run 2 | 6.72 | −74.6 |
| 1351 | | 6.46 | −72.8 |
| 1352 | Run 1 | Undefined | −31.0 |
| 1352 | Run 2 | 23.5 | −36.5 |
| 1353 | | 8.35 | −57.1 |
| 1354 | | Undefined | −32.8 |
| 1355 | | >500 | −1.4 |
| 1356 | | >500 | −19.1 |
| 1357 | | Undefined | −53.8 |
| 1358 | | 10.9 | −63.6 |
| 1359 | | 7.91 | −57.3 |
| 1360 | | 10.5 | −63.8 |
| 1361 | | 3.53 | −37.2 |
| 1362 | | >500 | −3.7 |
| 1363 | | >500 | −19.6 |
| 1364 | Run 1 | Undefined | −36.2 |
| 1364 | Run 2 | 40.9 | −40.0 |
| 1365 | | 26.2 | −50.3 |
| 1366 | Run 1 | 4.25 | −50.8 |
| 1366 | Run 2 | 1.76 | −52.4 |
| 1367 | | >500 | 23.8 |
| 1368 | | Undefined | −39.2 |
| 1369 | | >500 | −32.2 |
| 1370 | | 16.3 | −49.5 |
| 1371 | | Undefined | −51.8 |
| 1372 | | 43.5 | −73.6 |
| 1373 | | 4.18 | −60.3 |
| 1374 | | 11.9 | −62.0 |
| 1375 | | 9.86 | −61.2 |
| 1376 | | 7.68 | −61.3 |
| 1377 | | 4.8 | −50.1 |
| 1378 | Run 1 | 2.32 | −61.0 |
| 1378 | Run 2 | 1.91 | −65.2 |
| 1379 | | 7.06 | −59.1 |
| 1380 | | 14.4 | −64.5 |
| 1381 | Run 1 | Undefined | −31.4 |
| 1381 | Run 2 | >500 | −3.3 |
| 1382 | | 6.69 | −36.3 |
| 1383 | | >500 | −14.2 |
| 1384 | | 24.7 | −72.1 |
| 1385 | | 7.57 | −65.4 |
| 1386 | | 5.78 | −80.7 |
| 1387 | | 13 | −60.6 |
| 1388 | | 18.1 | −71.0 |
| 1389 | | 6.48 | −72.6 |
| 1390 | | 1.79 | −68.7 |
| 1391 | | 3.7 | −77.4 |
| 1392 | | 7.54 | −74.5 |
| 1393 | | 2.25 | −66.4 |
| 1394 | | 4.24 | −69.7 |
| 1395 | | 2.06 | −64.5 |
| 1396 | Run 1 | 1.01 | −69.3 |
| 1396 | Run 2 | 0.597 | −71.2 |
| 1397 | | 2.63 | −70.2 |
| 1398 | | 5.5 | −74.8 |
| 1399 | | 1.93 | −70.0 |
| 1400 | | 3.14 | −74.4 |
| 1401 | | 9.12 | −70.5 |
| 1402 | | Undefined | −43.8 |
| 1403 | | 8.46 | −70.3 |
| 1404 | | 9.15 | −75.0 |
| 1405 | | 14.5 | −63.9 |
| 1406 | | 4.89 | −60.6 |
| 1407 | | 5.41 | −52.0 |
| 1408 | Run 1 | 2.46 | −42.3 |
| 1408 | Run 2 | 1.75 | −67.0 |
| 1409 | | 19.5 | −64.5 |
| 1410 | | >500 | −28.7 |
| 1411 | | >500 | −14.2 |
| 1412 | | >500 | −3.4 |
| 1413 | | 4.59 | −58.6 |
| 1414 | | Undefined | −43.9 |
| 1415 | | Undefined | −54.5 |
| 1416 | Run 1 | >500 | 22.8 |
| 1416 | Run 2 | >500 | 13.1 |
| 1417 | | >500 | 0.5 |
| 1418 | | >500 | 43.6 |
| 1419 | | 77.3 | −64.7 |
| 1420 | Run 1 | >500 | 9.3 |
| 1420 | Run 2 | >500 | −4.3 |
| 1421 | Run 1 | 7.54 | −47.1 |
| 1421 | Run 2 | 26.3 | −43.0 |
| 1422 | | 4.9 | −53.3 |
| 1423 | | 2.06 | −54.0 |
| 1424 | | Undefined | −49.9 |
| 1425 | | 3.79 | −55.6 |
| 1426 | | Undefined | −45.5 |
| 1427 | | 0.569 | −46.2 |
| 1428 | | 7.11 | −72.7 |
| 1429 | | 0.653 | −63.3 |
| 1430 | | 1.07 | −66.8 |
| 1431 | | 4.47 | −70.9 |
| 1432 | | 7.62 | −63.1 |
| 1433 | | 15.8 | −66.5 |
| 1434 | | 4.22 | −64.0 |
| 1435 | | 5.61 | −57.6 |
| 1436 | | Undefined | −45.5 |
| 1437 | | Undefined | −39.1 |
| 1438 | | 32.2 | −69.4 |
| 1439 | | 4.03 | −48.3 |
| 1440 | | Undefined | −40.6 |
| 1441 | Run 1 | 13.7 | −45.1 |
| 1441 | Run 2 | Undefined | −61.3 |
| 1442 | | 1.48 | −57.2 |
| 1443 | | 4.08 | −70.3 |
| 1444 | | 6.59 | −68.0 |
| 1445 | | 5.2 | −44.5 |
| 1446 | Run 1 | 16.2 | −77.6 |
| 1446 | Run 2 | 18 | −82.3 |
| 1447 | | 3.61 | −64.6 |
| 1448 | | 8.4 | −44.0 |
| 1449 | | >500 | −21.8 |
| 1450 | | 28.4 | −67.6 |
| 1451 | | 8.59 | −57.0 |
| 1452 | | 7.12 | −62.2 |
| 1453 | | 3.53 | −62.4 |
| 1454 | Run 1 | 16.5 | −76.5 |
| 1454 | Run 2 | 6.29 | −51.7 |
| 1455 | | 3.26 | −61.8 |
| 1456 | | 2.62 | −58.2 |
| 1457 | | 9.92 | −55.2 |
| 1458 | | 6.52 | −80.4 |
| 1459 | Run 1 | 1.57 | −64.4 |
| 1459 | Run 2 | 4.65 | −63.4 |
| 1460 | | 3.82 | −61.8 |
| 1461 | | 4.83 | −80.9 |
| 1462 | | 3.11 | −82.0 |
| 1463 | | 3.2 | −78.5 |
| 1464 | | 3.85 | −72.9 |
| 1465 | | 2.94 | −79.1 |
| 1466 | | 2.73 | −70.7 |
| 1467 | | 2.78 | −67.1 |
| 1468 | | 3.24 | −64.2 |
| 1469 | | 8.53 | −71.2 |
| 1470 | | 7.92 | −73.5 |
| 1471 | | 4.63 | −67.0 |
| 1472 | | 7.7 | −66.0 |
| 1473 | | 5.15 | −67.9 |
| 1474 | | 7.04 | −76.4 |
| 1475 | | 3.17 | −74.5 |
| 1476 | | 1.86 | −72.8 |
| 1477 | | 6.87 | −62.9 |
| 1478 | | 19.1 | −61.4 |
| 1479 | | 3.31 | −79.0 |
| 1480 | | 5.12 | −74.9 |
| 1481 | | 2.39 | −74.5 |
| 1482 | | 7.5 | −69.0 |
| 1483 | | 3.6 | −70.0 |
| 1484 | | 1.97 | −72.2 |
| 1485 | | 5.47 | −79.8 |
| 1486 | | 6.5 | −73.7 |
| 1487 | | 5.19 | −59.7 |
| 1488 | | 1.78 | −81.0 |
| 1489 | | 1.99 | −61.5 |
| 1490 | | 0.976 | −60.4 |
| 1491 | | 2.58 | −73.5 |
| 1492 | | 0.878 | −81.6 |
| 1493 | | 3.86 | −81.7 |
| 1494 | | 2.53 | −64.3 |
| 1495 | | 3.27 | −75.3 |
| 1496 | | 1.24 | −90.2 |
| 1497 | | 1.26 | −81.8 |
| 1498 | | 1.44 | −86.2 |
| 1499 | | 1.14 | −69.0 |
| 1500 | Run 1 | 1.85 | −75.9 |
| 1500 | Run 2 | 1.07 | −71.1 |
| 1500 | Run 3 | 1.73 | −80.0 |
| 1501 | | 1.31 | −81.6 |
| 1502 | | 1.91 | −71.2 |
| 1503 | | 4.05 | −77.5 |
| 1504 | | 3.64 | −75.5 |
| 1505 | | 1.22 | −76.0 |
| 1506 | | 0.925 | −57.1 |
| 1507 | Run 1 | 2.22 | −74.5 |
| 1507 | Run 2 | 2.84 | −72.6 |
| 1507 | Run 3 | 3.58 | −64.9 |
| 1508 | | 3.57 | −73.6 |
| 1509 | Run 1 | 2.55 | −76.4 |
| 1509 | Run 2 | 3.9 | −72.5 |
| 1510 | Run 1 | 0.449 | −73.0 |
| 1510 | Run 2 | 0.715 | −65.6 |
| 1511 | | 3.23 | −74.2 |
| 1512 | Run 1 | 2.08 | −77.9 |
| 1512 | Run 2 | 2.54 | −62.8 |
| 1513 | | 4.14 | −68.2 |
| 1514 | Run 1 | 5.72 | −67.8 |
| 1514 | Run 2 | 5.64 | −77.0 |
| 1515 | | 2.7 | −75.4 |
| 1516 | | 2.5 | −66.4 |
| 1517 | | 2.83 | −66.8 |
| 1518 | Run 1 | 1.91 | −66.6 |
| 1518 | Run 2 | 5.63 | −70.0 |
| 1518 | Run 3 | 3.13 | −76.4 |
| 1519 | | 3.52 | −63.2 |
| 1520 | | 1.05 | −70.7 |
| 1521 | | 1.41 | −56.4 |
| 1522 | | 2.37 | −68.2 |
| 1523 | | 0.935 | −68.4 |
| 1524 | Run 1 | 4.41 | −75.7 |
| 1524 | Run 2 | 0.914 | −70.3 |
| 1525 | | 3.18 | −62.3 |
| 1526 | | 4.5 | −66.1 |
| 1527 | | 1.93 | −73.6 |
| 1528 | | 1.35 | −79.4 |
| 1529 | | 1.8 | −72.2 |
| 1530 | Run 1 | 0.598 | −58.8 |
| 1530 | Run 2 | 1.12 | −69.6 |
| 1531 | | 1.59 | −76.4 |
| 1532 | | 2.1 | −67.7 |
| 1533 | | 2.56 | −41.1 |
| 1534 | | 5.96 | −57.4 |
| 1535 | Run 1 | 1.75 | −61.3 |
| 1535 | Run 2 | 0.449 | −58.7 |
| 1536 | | 14.7 | −66.5 |
| 1537 | | 0.47 | −44.4 |
| 1538 | | 2.27 | −45.6 |

### Example 5: In Vivo Efficacy of siRNA Molecules in an AAV Human FAM13A Mouse Model

[0229] To assess the efficacy of the FAM13A siRNA molecules, the top performing FAM13A siRNA molecules from the in vitro activity assays described in Example 4 were evaluated for in vivo efficacy and durability in a C57BL/6 mouse model. Broadly, the FAM13A siRNA molecules were administered to mice expressing a portion of the human FAM13A gene. For these experiments, the sense strand in each tested siRNA molecule was conjugated to the trivalent GalNAc moiety shown in Formula VII or to docosanoic acid (C22), using the methods described in Example 3. In some experiments, FAM13A siRNA molecules were evaluated for in vivo efficacy and durability with altered chemical modification patterns.

[0230] The mouse model used was an AAV human FAM13A mouse model. In advance of siRNA injection, 10-12-week-old C57BL/6 mice (The Jackson Laboratory) were fed standard chow (Harlan, 2020× Teklad global soy protein-free extruded rodent diet). Female C57Bl6 mice 10-14 weeks old were intravenously (i.v.) injected with an adeno-associated virus (AAV) engineered to coexpress both eGFP and a portion of the human FAM13A gene transcript. The construct used was: AAV-hFAM13A-1 (encoding nucleotides 1200-2900 of SEQ ID NO: 1; “AAV1”), AAV-hFAM13A-2 (encoding nucleotides 2800-4500 of SEQ ID NO: 1; “AAV2”), AAV-hFAM13A-3 (encoding nucleotides 4400-6100 of SEQ ID NO: 1; “AAV3”), AAV-hFAM13A-9span (encoding selected portions of SEQ ID NO: 1 that contain SEQ ID NOs: 15, 24, 125, 127, 222, 233, 481, 498, 503, 504, and 513, connected by linkers; “AAV-9span”), or AAV-FAM13A-22span (encoding selected portions of SEQ ID NO: 1 that contain SEQ ID NOs: 15, 24, 41, 125, 127, 150, 164, 222, 233, 406, 448, 466, 470, 481, 498, 503, 504, 513, 523, 526, 527, 533, and 534, connected by linkers; “AAV-22span”).

[0231] Each mouse was injected with a single AAV at a dose of 1×10¹² genome copies (GC) per animal. Two weeks following AAV injection, mice received a single subcutaneous (s.c.) injection of buffer (PBS) or the FAM13A siRNA molecule at a dose of 0.5 mg/kg, 1 mg/kg, 3 mg/kg, 5 mg/kg, 15 mg/kg, or 20 mg/kg body weight in PBS (n=3 or 4 mice per group, as indicated below).

[0232] Liver and subcutaneous white adipose tissue (ScWAT) were collected 2 or 4 weeks following siRNA administration and analyzed. RNA from harvested animal tissues was processed for qPCR analysis. RNA was isolated from 50-100 mg tissue using RNeasy 96 universal tissue kit RNA isolation protocol following manufacturer's instructions (Qiagen) or using a KingFisher Apex system and the MagMAX mirVana Total RNA Isolation Kit according to the manufacturer's instructions (ThermoFisher). Real-time PCR was performed using TaqMan® RNA-to-Ct™ 1-Step Kit following manufacturer's instructions (ThermoFisher) with 50 ng RNA per reaction and the following primer probe sets: (1) eGFP1 Forward primer: CTATGTGCAGGAGAGAACCATC (Sense; SEQ ID NO: 2798); Reverse primer: GCCCTTCAGCTCGATTCTATT (Antisense; SEQ ID NO: 2799); Probe: 5′-6FAM-TACAAGACCCGCGCTGAAGTCAAG TAMRA-3′ (Sense; SEQ ID NO: 2800); (2) eGFP2 Forward primer: TCATCTGCACCACTGGAAAG (Sense; SEQ ID NO: 2801); Reverse primer: CTGCTTCATATGGTCTGGGTATC (Antisense; SEQ ID NO: 2802); Probe: 5′-6FAM CCAACACTGGTCACTACCCTCACC TAMRA-3′ (Sense; SEQ ID NO: 2803); (3) BGH Forward primer: 5′-GCCAGCCATCTGTTGT-3′ (SEQ ID NO: 2804); Reverse primer: 5′-GGAGTGGCACCTTCCA-3′ (SEQ ID NO: 2805); Probe: 5′-6FAM-TCCCCCGTGCCTTCCTTGACC TAMRA-3′ (Sense; SEQ ID NO: 2806); and (4) mPpib TaqMan® gene expression assay (Mm00478295 Thermo Fisher). Knockdown of mRNA levels were quantified using primer sets targeting either the eGFP sequence in the 5′ end of the construct (i.e., eGFP primer set #1 or eGFP primer set #2) or the bovine growth hormone polyadenylation signal present in the viral mRNA (BGHpA primer set) at the 3′ end of construct. The knockdown efficiency of the siRNA triggers was determined using semi-quantitative real-time polymerase chain reactions on a QuantStudio 7 Flex real time thermocycler. Gene expression was calculated using the ΔΔCt approach while utilizing cyclophilin (PPIB) as the reference gene. A percentage change in human FAM13A mRNA in liver or ScWAT for each animal was calculated relative to the level of human FAM13A mRNA in the liver or ScWAT of control animals. The control animals used to calculate the percentage change expressed the same human FAM13A mRNA but received the buffer only injection in place of an siRNA injection.

[0233] Results of the studies in the AAV-FAM13A mouse model with different FAM13A siRNA molecules are shown in Tables 4-17 below. Data are expressed as average percent change from control at week 4 or 6 of each study (i.e., 2 or 4 weeks after siRNA injection as indicated) for each treatment group (n=3 or 4 animals/group as indicated). The trigger family refers to the first nucleotide in the range of nucleotides of SEQ ID NO: 1 that is targeted by a given siRNA molecule. If a FAM13A siRNA molecule has the same trigger family designation as another FAM13A siRNA molecule but differs in duplex number, then the two molecules have the same core sequence (i.e., the siRNA molecules target the same region of the FAM13A transcript) but differ in chemical modification pattern as detailed in Table 2. A chart of a subset of this data is also shown in FIGS. 8A-8D.

TABLE 4
siRNA Efficacy in Liver 4 Weeks Following siRNA Injection

| SIRNA | Trigger | Dose | | AAV | | Avg. % Change in mRNA ± STD | | |
|---|---|---|---|---|---|---|---|---|
| Duplex | Family | (mg/kg) | N | No. | Carrier | eGFP-1 | eGFP-2 | BGHpA |
| D-1545 | 1309 | 1 | 3 | AAV1 | GalNAc | −42.71 ± 5.394 | −42.27 ± 6.616 | −43.14 ± 7.444 |
| D-1570 | 1311 | 1 | 4 | AAV1 | GalNAc | −19.4 ± 22.73 | −20.06 ± 23.37 | −11.63 ± 22.15 |
| D-1569 | 1338 | 1 | 4 | AAV1 | GalNAc | −11.79 ± 13.66 | −9.43 ± 15.27 | −2.923 ± 19.6 |
| D-1543 | 1366 | 1 | 4 | AAV1 | GalNAc | 6.133 ± 27.89 | −6.135 ± 26.59 | −0.283 ± 29.62 |
| D-1542 | 1489 | 1 | 4 | AAV1 | GalNAc | 35.76 ± 43.79 | −9.96 ± 10.4 | −3.553 ± 24.72 |
| D-1553 | 1495 | 1 | 4 | AAV1 | GalNAc | 23.78 ± 27.21 | −19.31 ± 9.899 | −22.28 ± 11.59 |
| D-1576 | 1533 | 1 | 4 | AAV1 | GalNAc | 24.96 ± 21.55 | 23.82 ± 31.71 | −10.03 ± 7.092 |
| D-1575 | 1558 | 1 | 4 | AAV1 | GalNAc | 33.74 ± 49.25 | 13.87 ± 59.23 | −6.078 ± 39.15 |
| D-1574 | 1619 | 1 | 4 | AAV1 | GalNAc | 40.25 ± 54.93 | −34.08 ± 31.01 | −36.47 ± 25.89 |
| D-1554 | 1632 | 1 | 4 | AAV1 | GalNAc | −6.793 ± 44.9 | −31.49 ± 35.05 | −35.24 ± 28.19 |
| D-1563 | 1896 | 1 | 4 | AAV1 | GalNAc | 29.29 ± 45.3 | −8.05 ± 32.28 | −13.19 ± 25.73 |
| D-1568 | 2066 | 1 | 4 | AAV1 | GalNAc | 21.07 ± 48.89 | −13.38 ± 36.29 | −18.64 ± 22.78 |
| D-1567 | 2070 | 1 | 4 | AAV1 | GalNAc | −23.67 ± 22.87 | −21.89 ± 19.75 | −29.35 ± 12.26 |
| D-1550 | 2078 | 1 | 4 | AAV1 | GalNAc | −25.78 ± 25.17 | −15.87 ± 29.37 | −19.85 ± 24.99 |
| D-1549 | 2080 | 1 | 4 | AAV1 | GalNAc | −44.66 ± 24.88 | −37.31 ± 28.36 | −33.42 ± 23.16 |
| D-1544 | 2144 | 1 | 4 | AAV1 | GalNAc | −28.04 ± 10.28 | −23.07 ± 13.65 | −36.02 ± 7.789 |
| D-1565 | 2146 | 1 | 4 | AAV1 | GalNAc | −1.398 ± 16.51 | 3.045 ± 16.82 | −17.82 ± 16.44 |
| D-1539 | 2151 | 1 | 3 | AAV1 | GalNAc | −32.85 ± 3.319 | −27.82 ± 3.752 | −35.23 ± 5.315 |
| D-1573 | 2263 | 1 | 4 | AAV1 | GalNAc | −39.7 ± 15.67 | −37.2 ± 17.08 | −60.35 ± 10.09 |
| D-1547 | 2266 | 1 | 4 | AAV1 | GalNAc | 26.08 ± 32.18 | 5.21 ± 30.99 | −37.34 ± 10.9 |
| D-1556 | 2356 | 1 | 4 | AAV1 | GalNAc | 62.47 ± 17.62 | 38.02 ± 19.36 | −6.388 ± 11.61 |
| D-1578 | 2360 | 1 | 4 | AAV1 | GalNAc | 13.18 ± 30.52 | −6.565 ± 26.66 | −36.01 ± 14.96 |
| D-1581 | 2623 | 1 | 4 | AAV1 | GalNAc | −1.75 ± 5.865 | −22.66 ± 7.519 | −57.66 ± 5.097 |
| D-1561 | 2887 | 1 | 4 | AAV1 | GalNAc | 16.06 ± 19.7 | −2.823 ± 18.4 | −40.04 ± 5.249 |
| D-1561 | 2887 | 1 | 3 | AAV2 | GalNAc | −23.87 ± 27.24 | −20.19 ± 29.58 | −36.03 ± 9.772 |
| D-1620 | 2889 | 1 | 3 | AAV1 | GalNAc | 40.81 ± 24.72 | 15.21 ± 24.44 | −39.23 ± 10.53 |
| D-1620 | 2889 | 1 | 3 | AAV2 | GalNAc | 52.21 ± 70.23 | 47.44 ± 78.78 | −39.71 ± 28.42 |
| D-1560 | 2890 | 1 | 3 | AAV2 | GalNAc | −17.63 ± 29.61 | −12.89 ± 40.28 | −19.9 ± 24.63 |
| D-1559 | 2893 | 1 | 3 | AAV2 | GalNAc | −27.2 ± 15.47 | −25.82 ± 14.26 | −38.13 ± 14.9 |
| D-1558 | 2895 | 1 | 4 | AAV2 | GalNAc | −4.058 ± 33.95 | −1.795 ± 34.36 | −18.15 ± 26.74 |
| D-1604 | 2923 | 1 | 4 | AAV2 | GalNAc | −18.23 ± 34.59 | −14.74 ± 36.79 | −27.4 ± 32.69 |
| D-1541 | 2934 | 1 | 4 | AAV2 | GalNAc | −24.22 ± 24.87 | −17.93 ± 26.09 | −32.21 ± 24.58 |
| D-1588 | 2937 | 1 | 4 | AAV2 | GalNAc | −6.588 ± 17.49 | −2.385 ± 20.55 | −20.34 ± 14.32 |
| D-1619 | 2994 | 1 | 4 | AAV2 | GalNAc | −4.965 ± 29.63 | −0.955 ± 31.88 | −16.1 ± 23.98 |
| D-1557 | 3000 | 1 | 4 | AAV2 | GalNAc | −38.01 ± 36.01 | −38.72 ± 32.87 | −45.02 ± 26.58 |
| D-1579 | 3002 | 1 | 4 | AAV2 | GalNAc | −29.78 ± 13.38 | −23.06 ± 12.39 | −29.02 ± 11.54 |
| D-1555 | 3014 | 1 | 4 | AAV2 | GalNAc | −33.3 ± 38.16 | −33.52 ± 35.11 | −27.61 ± 45.38 |
| D-1586 | 3133 | 1 | 3 | AAV2 | GalNAc | −14.15 ± 24.03 | −14.48 ± 32.6 | −32.73 ± 22.7 |
| D-1540 | 3184 | 1 | 4 | AAV2 | GalNAc | 49.01 ± 85.72 | 47.35 ± 84.39 | −15.39 ± 48 |
| D-1552 | 3187 | 1 | 4 | AAV2 | GalNAc | −23.01 ± 40.18 | −23.16 ± 41.09 | −57.91 ± 23.56 |
| D-1618 | 3189 | 1 | 4 | AAV2 | GalNAc | −15.8 ± 32.14 | −11.32 ± 38.42 | −55.8 ± 15.9 |
| D-1585 | 3192 | 1 | 4 | AAV2 | GalNAc | −23.44 ± 22.34 | −25.44 ± 24.5 | −32.71 ± 15.77 |
| D-1584 | 3283 | 1 | 4 | AAV2 | GalNAc | 51.7 ± 81.84 | 48.43 ± 75.58 | −28.35 ± 32.39 |
| D-1580 | 3438 | 1 | 3 | AAV2 | GalNAc | 37.73 ± 23.51 | 37.64 ± 14.87 | −41.3 ± 12.94 |
| D-1583 | 3498 | 1 | 4 | AAV2 | GalNAc | 61.43 ± 51.09 | 70.94 ± 52.52 | −40.57 ± 15.94 |
| D-1582 | 3499 | 1 | 4 | AAV2 | GalNAc | 3.543 ± 40.05 | 5.378 ± 33.08 | −50.74 ± 20.44 |
| D-1571 | 3569 | 1 | 4 | AAV2 | GalNAc | 87.02 ± 48.83 | 105.1 ± 53.36 | −23.29 ± 23.41 |
| D-1551 | 3777 | 1 | 4 | AAV2 | GalNAc | 32.18 ± 41.17 | 38.02 ± 52.05 | −37.14 ± 25.23 |
| D-1548 | 4008 | 1 | 4 | AAV2 | GalNAc | 55.32 ± 23.06 | 52.73 ± 30.99 | −42 ± 8.405 |
| D-1600 | 4109 | 1 | 4 | AAV2 | GalNAc | −0.87 ± 54.04 | 4.31 ± 64.12 | −53.28 ± 23.72 |

TABLE 5
siRNA Dose-Response in Liver 2 Weeks Following siRNA Injection

| SIRNA | Trigger | Dose | | AAV | | Avg. % Change in mRNA ± STD | | |
|---|---|---|---|---|---|---|---|---|
| Duplex | Family | (mg/kg) | N | No. | Carrier | eGFP-1 | eGFP-2 | BGHpA |
| D-1545 | 1309 | 0.5 | 4 | AAV1 | GalNAc | 32.32 ± 41.77 | 27.47 ± 45.03 | 60.59 ± 56.66 |
| D-1545 | 1309 | 1 | 3 | AAV1 | GalNAc | −43.11 ± 49.6 | −43.36 ± 48.77 | −21.68 ± 72.64 |
| D-1545 | 1309 | 3 | 3 | AAV1 | GalNAc | −38.58 ± 8.37 | −38.32 ± 8.48 | −4.04 ± 17.42 |
| D-1635 | 1309 | 5 | 4 | AAV1 | C22 | −33.1 ± 36.41 | −38.7 ± 34.27 | −36.57 ± 31.56 |
| D-1635 | 1309 | 15 | 4 | AAV1 | C22 | −9.79 ± 18.62 | −11.38 ± 16.78 | −6.75 ± 28.58 |
| D-1639 | 1309 | 5 | 4 | AAV1 | C22 | 40.4 ± 22.62 | 31.4 ± 25.97 | 19.65 ± 19.04 |
| D-1639 | 1309 | 15 | 4 | AAV1 | C22 | −3.26 ± 22.12 | −8.76 ± 21.44 | −8.45 ± 16.66 |
| D-1640 | 1309 | 0.5 | 4 | AAV1 | GalNAc | −28.7 ± 46.06 | −32.11 ± 44.06 | −2.33 ± 58.61 |
| D-1640 | 1309 | 1 | 4 | AAV1 | GalNAc | −46.12 ± 29.63 | −47.19 ± 29.99 | −19.78 ± 50.46 |
| D-1640 | 1309 | 3 | 3 | AAV1 | GalNAc | −45.55 ± 4.81 | −46.32 ± 6.37 | −19.31 ± 10.39 |
| D-1549 | 2080 | 0.5 | 3 | AAV1 | GalNAc | −8.73 ± 17.94 | −11.9 ± 18.81 | −10.33 ± 22.34 |
| D-1549 | 2080 | 1 | 3 | AAV1 | GalNAc | −60.51 ± 24.19 | −53.49 ± 11.13 | −52.03 ± 14.74 |
| D-1549 | 2080 | 3 | 3 | AAV1 | GalNAc | −47.02 ± 17.61 | −47.06 ± 20.21 | −47.44 ± 14.68 |
| D-1643 | 2080 | 5 | 3 | AAV1 | C22 | 9.49 ± 25.88 | −0.76 ± 26.26 | −11.85 ± 13.08 |
| D-1643 | 2080 | 15 | 3 | AAV1 | C22 | 6.1 ± 41.35 | 2.91 ± 39.69 | −6.65 ± 37.28 |
| D-1544 | 2144 | 0.5 | 4 | AAV1 | GalNAc | −34.12 ± 38.75 | −39.14 ± 36.58 | −10.02 ± 46.03 |
| D-1544 | 2144 | 1 | 4 | AAV1 | GalNAc | −5.52 ± 24.49 | −3.87 ± 28.72 | 23.6 ± 37.54 |
| D-1544 | 2144 | 3 | 3 | AAV1 | GalNAc | −52.79 ± 51.1 | −54.53 ± 49.23 | −28.81 ± 78.9 |
| D-1636 | 2144 | 5 | 4 | AAV1 | C22 | −15.47 ± 42.39 | −23.31 ± 36.14 | −16.14 ± 34.22 |
| D-1636 | 2144 | 15 | 4 | AAV1 | C22 | −43.75 ± 19.47 | −44.85 ± 17.58 | −39.17 ± 18.75 |
| D-1539 | 2151 | 1 | 4 | AAV1 | GalNAc | 13.36 ± 33.44 | 4.59 ± 30.4 | −0.61 ± 23.31 |
| D-1539 | 2151 | 3 | 4 | AAV1 | GalNAc | −15.59 ± 26.47 | −16.46 ± 26.89 | −15.8 ± 20.8 |
| D-1573 | 2263 | 0.5 | 3 | AAV1 | GalNAc | −2.52 ± 64.76 | −5.55 ± 66.02 | 3.78 ± 43.72 |
| D-1573 | 2263 | 1 | 3 | AAV1 | GalNAc | −36.45 ± 14.44 | −36.88 ± 13.96 | −35.55 ± 7.81 |
| D-1573 | 2263 | 3 | 4 | AAV1 | GalNAc | −16.91 ± 14.29 | −16.85 ± 11.81 | −19.48 ± 14.82 |
| D-1638 | 2263 | 5 | 3 | AAV1 | C22 | 6.18 ± 39.91 | 1.64 ± 38.82 | 0.64 ± 24.22 |
| D-1638 | 2263 | 15 | 4 | AAV1 | C22 | −14.48 ± 14.06 | −15.34 ± 16.81 | −32.49 ± 23.85 |
| D-1644 | 2263 | 5 | 3 | AAV1 | C22 | −4.49 ± 28.46 | −8.13 ± 28.85 | −9.74 ± 20.2 |
| D-1644 | 2263 | 15 | 3 | AAV1 | C22 | −40.62 ± 32.29 | −41.72 ± 34.15 | −45.04 ± 28.65 |
| D-1645 | 2263 | 0.5 | 3 | AAV1 | GalNAc | 17.05 ± 15.72 | 13.25 ± 12.64 | 5.3 ± 8.75 |
| D-1645 | 2263 | 1 | 3 | AAV1 | GalNAc | 11.58 ± 11.59 | 12 ± 9.78 | 19.45 ± 15.6 |
| D-1645 | 2263 | 3 | 4 | AAV1 | GalNAc | −30.31 ± 8.48 | −31.96 ± 5.84 | −34.08 ± 16.03 |
| D-1557 | 3000 | 1 | 3 | AAV2 | GalNAc | 3.82 ± 37.62 | −4.13 ± 31.55 | 5.9 ± 34.59 |
| D-1557 | 3000 | 3 | 3 | AAV2 | GalNAc | 9.8 ± 49.78 | 6.24 ± 48.34 | 27.57 ± 48.71 |
| D-1642 | 3000 | 15 | 3 | AAV2 | C22 | −60.07 ± 23.8 | −58.2 ± 24.84 | −52.11 ± 26.5 |
| D-1586 | 3133 | 1 | 4 | AAV2 | GalNAc | −9.95 ± 20.45 | −7.39 ± 16.97 | −6.25 ± 21.94 |
| D-1586 | 3133 | 3 | 3 | AAV2 | GalNAc | −46.14 ± 14.71 | −42.98 ± 17.58 | −39.14 ± 15.32 |
| D-1637 | 3133 | 15 | 3 | AAV2 | C22 | −17.3 ± 10.47 | −17.27 ± 10.65 | −16.31 ± 9.96 |

TABLE 6
siRNA Efficacy in Liver 4 Weeks Following siRNA Injection

| SIRNA | Trigger | Dose | | AAV | | Avg. % Change in mRNA ± STD | | |
|---|---|---|---|---|---|---|---|---|
| Duplex | Family | (mg/kg) | N | No. | Carrier | eGFP-1 | eGFP-2 | BGHpA |
| D-1599 | 1328 | 1 | 4 | AAV1 | GalNAc | −45.95 ± 34.12 | −51.22 ± 29.38 | −43.47 ± 38.85 |
| D-1597 | 1333 | 1 | 4 | AAV1 | GalNAc | −62.57 ± 20.24 | −64.15 ± 18.92 | −62.8 ± 14.32 |
| D-1589 | 1496 | 1 | 4 | AAV1 | GalNAc | 14.3 ± 63.6 | 10.78 ± 62.99 | −4.3 ± 34.03 |
| D-1616 | 1534 | 1 | 4 | AAV1 | GalNAc | −11.65 ± 14.21 | −16.95 ± 16.59 | −11.05 ± 10.43 |
| D-1610 | 1631 | 1 | 4 | AAV1 | GalNAc | −48.26 ± 55.95 | −52.2 ± 51.51 | −53.22 ± 49.44 |
| D-1607 | 1666 | 1 | 4 | AAV1 | GalNAc | −49.8 ± 32.9 | −51.01 ± 30.93 | −54.32 ± 27.54 |
| D-1609 | 1671 | 1 | 4 | AAV1 | GalNAc | −4.39 ± 32.6 | −17.13 ± 26.03 | −19.54 ± 26.39 |
| D-1615 | 1678 | 1 | 4 | AAV1 | GalNAc | −41.13 ± 53.81 | −49.28 ± 45.76 | −45.21 ± 48.78 |
| D-1605 | 1698 | 1 | 4 | AAV1 | GalNAc | −33.95 ± 19.59 | −36.11 ± 16.39 | −36.42 ± 16.43 |
| D-1606 | 1705 | 1 | 4 | AAV1 | GalNAc | −17.39 ± 28.54 | −19.93 ± 31.05 | −25.46 ± 25.93 |
| D-1587 | 1801 | 1 | 4 | AAV1 | GalNAc | 45.99 ± 35.41 | 32.63 ± 29.48 | 14.33 ± 25.53 |
| D-1608 | 1952 | 1 | 4 | AAV1 | GalNAc | 21.23 ± 45.64 | 18.69 ± 46.27 | 12.11 ± 38.75 |
| D-1601 | 2075 | 1 | 4 | AAV1 | GalNAc | 3.48 ± 52.45 | 11.81 ± 55.2 | −28.69 ± 27.8 |
| D-1602 | 2270 | 1 | 4 | AAV1 | GalNAc | −31.34 ± 30.1 | −29.49 ± 32.27 | −29.03 ± 29.76 |
| D-1613 | 2344 | 1 | 4 | AAV1 | GalNAc | −16.52 ± 26.48 | −5.98 ± 37.64 | −16.72 ± 16.64 |
| D-1598 | 2353 | 1 | 3 | AAV1 | GalNAc | −6.46 ± 79.75 | 2.57 ± 87.09 | −11.44 ± 74.95 |
| D-1595 | 2358 | 1 | 3 | AAV1 | GalNAc | −17.2 ± 28.13 | −8.88 ± 30.22 | −8.88 ± 30.22 |
| D-1592 | 2462 | 1 | 4 | AAV1 | GalNAc | −19.82 ± 24.34 | −16.13 ± 26.34 | 98.03 ± 8.2 |
| D-1621 | 2632 | 1 | 4 | AAV1 | GalNAc | −13.73 ± 45.73 | −9.86 ± 49.02 | 64.93 ± 59.16 |
| D-1620 | 2889 | 1 | 4 | AAV2 | GalNAc | −37.46 ± 43.63 | −40.78 ± 35.94 | −45.42 ± 32.5 |
| D-1604 | 2923 | 1 | 4 | AAV2 | GalNAc | 39.14 ± 72.97 | 25.32 ± 61.13 | 15.5 ± 48.93 |
| D-1588 | 2937 | 1 | 3 | AAV2 | GalNAc | 6.07 ± 22.94 | 5.99 ± 30.89 | −5.12 ± 13.34 |
| D-1619 | 2994 | 1 | 4 | AAV2 | GalNAc | 39.67 ± 48.64 | 44.18 ± 65.89 | 18.49 ± 38.81 |
| D-1618 | 3189 | 1 | 4 | AAV2 | GalNAc | 10.19 ± 27.42 | 3.71 ± 24.64 | 0.48 ± 24.64 |
| D-1632 | 3429 | 1 | 4 | AAV2 | GalNAc | 45.62 ± 34.77 | 41.55 ± 34.47 | 23.62 ± 31.38 |
| D-1617 | 3717 | 1 | 4 | AAV2 | GalNAc | 38.84 ± 47.24 | 37.53 ± 45.21 | 19 ± 42.75 |
| D-1626 | 3720 | 1 | 4 | AAV2 | GalNAc | −6.37 ± 40.83 | −11.26 ± 36.19 | −17.84 ± 31.67 |
| D-1600 | 4109 | 1 | 4 | AAV2 | GalNAc | 27.89 ± 36.42 | 22.01 ± 32.66 | 12.46 ± 28.14 |
| D-1590 | 4779 | 1 | 3 | AAV3 | GalNAc | −33.73 ± 13 | −38.93 ± 12.77 | 6 ± 19.5 |
| D-1630 | 4804 | 1 | 4 | AAV3 | GalNAc | −14.77 ± 6.49 | −12.14 ± 2.53 | −30.29 ± 35.81 |
| D-1596 | 4927 | 1 | 4 | AAV3 | GalNAc | −42.19 ± 18.45 | −41.27 ± 17.05 | −42.41 ± 18.48 |
| D-1594 | 4928 | 1 | 4 | AAV3 | GalNAc | −2.76 ± 27.16 | −1.57 ± 31.74 | −39.67 ± 30.85 |
| D-1593 | 4956 | 1 | 4 | AAV3 | GalNAc | 8.35 ± 10.98 | 14.89 ± 12.4 | 36.47 ± 110.18 |
| D-1631 | 4957 | 1 | 4 | AAV3 | GalNAc | −57.28 ± 10.53 | −54.33 ± 14.16 | −61.59 ± 11.91 |
| D-1634 | 4993 | 1 | 4 | AAV3 | GalNAc | −34.13 ± 23.86 | −29.69 ± 22.95 | −42.05 ± 16.41 |
| D-1614 | 4999 | 1 | 4 | AAV3 | GalNAc | −72.8 ± 18.55 | −70.72 ± 19.27 | −75.89 ± 15.31 |
| D-1633 | 5012 | 1 | 4 | AAV3 | GalNAc | −44.29 ± 14.87 | −41.01 ± 14.68 | −47.43 ± 12.41 |
| D-1611 | 5043 | 1 | 4 | AAV3 | GalNAc | −67.5 ± 14.12 | −64.75 ± 15.77 | −70.05 ± 12.45 |
| D-1612 | 5045 | 1 | 4 | AAV3 | GalNAc | −57.91 ± 11.94 | −56.76 ± 12.24 | −72.15 ± 19.53 |
| D-1591 | 5060 | 1 | 4 | AAV3 | GalNAc | −37.88 ± 21.07 | −36.57 ± 20.16 | −43.71 ± 19.3 |
| D-1603 | 5067 | 1 | 4 | AAV3 | GalNAc | −27.08 ± 12.11 | −21.28 ± 12.91 | −29.76 ± 9.66 |
| D-1629 | 5068 | 1 | 4 | AAV3 | GalNAc | −25.94 ± 28.07 | −22.16 ± 29.33 | −27.4 ± 24.84 |
| D-1628 | 5069 | 1 | 4 | AAV3 | GalNAc | −36.64 ± 25.96 | −33.81 ± 25.97 | −37.94 ± 22.7 |
| D-1623 | 5080 | 1 | 4 | AAV3 | GalNAc | −34.14 ± 2.45 | −29.15 ± 4.19 | −40.61 ± 6.41 |
| D-1627 | 5115 | 1 | 4 | AAV3 | GalNAc | −9.14 ± 24.05 | −4.67 ± 24.43 | −12.81 ± 27.17 |
| D-1622 | 5255 | 1 | 4 | AAV3 | GalNAc | −36.04 ± 17.88 | −33.61 ± 19.59 | −34.26 ± 15.69 |
| D-1625 | 5338 | 1 | 4 | AAV3 | GalNAc | −26.25 ± 35.36 | −24.19 ± 36.13 | −29.8 ± 29.64 |

TABLE 7
siRNA Efficacy in Liver and Adipose Tissue 4 Weeks Following siRNA Injection*

| siRNA | Trigger | Dose | | | | Avg. % Change in mRNA ± STD | | |
|---|---|---|---|---|---|---|---|---|
| Duplex | Family | (mg/kg) | N | Carrier | Tissue | eGFP-1 | eGFP-2 | BGHpA |
| D-1597 | 1333 | 3 | 4 | GalNAc | Liver | −56.3 ± 21.55 | −55.72 ± 21.86 | −51.8 ± 24.69 |
| D-1545 | 1309 | 3 | 3 | GalNAc | Liver | −38.49 ± 7.6 | −38.32 ± 10.46 | −35.9 ± 12.63 |
| D-1640 | 1309 | 3 | 4 | GalNAc | Liver | −27.46 ± 16.52 | −30.18 ± 15.06 | −26.35 ± 9.34 |
| D-1646 | 1309 | 3 | 4 | GalNAc | Liver | −33.27 ± 15.52 | −35.26 ± 16.91 | −36.1 ± 11.18 |
| D-1652 | 1309 | 3 | 4 | GalNAc | Liver | −37.03 ± 10.19 | −37.27 ± 11.97 | −40.53 ± 10.69 |
| D-1657 | 1309 | 3 | 4 | GalNAc | Liver | −42.36 ± 27.93 | −44.67 ± 25.92 | −47.49 ± 20.08 |
| D-1662 | 1309 | 3 | 4 | GalNAc | Liver | −49.31 ± 3.2 | −49.12 ± 3.99 | −36.17 ± 6.86 |
| D-1667 | 1309 | 3 | 4 | GalNAc | Liver | 64.41 ± 14.9 | −64.39 ± 13.81 | −53.08 ± 18.99 |
| D-1549 | 2080 | 3 | 3 | GalNAc | Liver | −42.27 ± 1.69 | −37.74 ± 6.96 | −36.56 ± 12.45 |
| D-1647 | 2080 | 3 | 4 | GalNAc | Liver | −9.81 ± 14.47 | −14.38 ± 34.58 | −15 ± 35.29 |
| D-1651 | 2080 | 3 | 4 | GalNAc | Liver | −14.14 ± 38.82 | −15.22 ± 33.33 | −7.23 ± 42.67 |
| D-1656 | 2080 | 3 | 4 | GalNAc | Liver | −26.48 ± 28.43 | 45.17 ± 17.46 | −46.61 ± 18.99 |
| D-1661 | 2080 | 3 | 4 | GalNAc | Liver | −57.19 ± 35.09 | −57.87 ± 34.18 | −46.61 ± 38.09 |
| D-1666 | 2080 | 3 | 4 | GalNAc | Liver | −10.47 ± 28.04 | −23.11 ± 34.64 | −21.77 ± 37.38 |
| D-1544 | 2144 | 3 | 4 | GalNAc | Liver | −43.5 ± 14.87 | −40.65 ± 14.86 | −27.59 ± 20.88 |
| D-1648 | 2144 | 3 | 4 | GalNAc | Liver | −53.99 ± 29.24 | −53.2 ± 28.75 | −46.51 ± 30.91 |
| D-1653 | 2144 | 3 | 4 | GalNAc | Liver | −36.13 ± 14.87 | −34.76 ± 16.33 | −25.79 ± 18.55 |
| D-1658 | 2144 | 3 | 4 | GalNAc | Liver | −39.78 ± 25.74 | −34.7 ± 27.83 | −32.37 ± 17.93 |
| D-1663 | 2144 | 3 | 4 | GalNAc | Liver | −27.73 ± 16.32 | −24.24 ± 16.47 | −23.95 ± 12.37 |
| D-1668 | 2144 | 3 | 4 | GalNAc | Liver | −29.31 ± 14.33 | −30.61 ± 11.87 | −19.7 ± 18.95 |
| D-1635 | 1309 | 20 | 4 | C22 | Liver | −31.24 ± 27.79 | −31.05 ± 29.03 | −23.73 ± 19.73 |
| D-1639 | 1309 | 20 | 4 | C22 | Liver | −43.19 ± 40.95 | −36.31 ± 47.36 | −40.72 ± 42.52 |
| D-1670 | 1309 | 20 | 4 | C22 | Liver | −18.18 ± 16.92 | −8.04 ± 17.92 | −16.58 ± 9.32 |
| D-1676 | 1309 | 20 | 4 | C22 | Liver | −22.36 ± 34.59 | −17.1 ± 39.02 | −11.76 ± 38.63 |
| D-1681 | 1309 | 20 | 3 | C22 | Liver | 47.73 ± 7.7 | −52.39 ± 10.5 | −55.07 ± 10.11 |
| D-1686 | 1309 | 20 | 3 | C22 | Liver | −46.26 ± 7.27 | −46.39 ± 8.07 | −44.22 ± 16.43 |
| D-1691 | 1309 | 20 | 4 | C22 | Liver | −32.27 ± 13.41 | −24.45 ± 15.05 | −28.15 ± 14.13 |
| D-1635 | 1309 | 20 | 4 | C22 | Adipose | 7.94 ± 65.35 | 9.18 ± 74.04 | −9.4 ± 78.81 |
| D-1639 | 1309 | 20 | 4 | C22 | Adipose | −61.2 ± 32.62 | −61.1 ± 33.16 | −61.15 ± 36.91 |
| D-1670 | 1309 | 20 | 4 | C22 | Adipose | −56.88 ± 23.59 | −51.24 ± 33.29 | −59.98 ± 24.89 |
| D-1676 | 1309 | 20 | 4 | C22 | Adipose | 63.2 ± 100.25 | 42.97 ± 75.56 | 24.61 ± 57.61 |
| D-1681 | 1309 | 20 | 3 | C22 | Adipose | 29.33 ± 103.09 | 19.17 ± 93.9 | −9.62 ± 76.91 |
| D-1686 | 1309 | 20 | 3 | C22 | Adipose | −79.73 ± 13.34 | −80.1 ± 13.72 | −80.3 ± 11.86 |
| D-1691 | 1309 | 20 | 4 | C22 | Adipose | −18.98 ± 17.2 | −20.98 ± 11.52 | −26.98 ± 11.76 |

*Table 7 contains data only from mice infected with the AAV1 viral construct

TABLE 8
siRNA Efficacy in Liver and Adipose Tissue 4 Weeks Following siRNA Injection

| SIRNA | Trigger | Dose | | AAV | | | Avg. % Change in mRNA ± STD | | |
|---|---|---|---|---|---|---|---|---|---|
| Duplex | Family | (mg/kg) | N | No. | Carrier | Tissue | eGFP-1 | eGFP-2 | BGHpA |
| D-1597 | 1333 | 1 | 4 | AAV1 | GalNAc | Liver | −37.5 ± 14.1 | −30.9 ± 13.3 | −47.3 ± 6.1 |
| D-1615 | 1678 | 1 | 4 | AAV1 | GalNAc | Liver | −37.9 ± 18 | −34.7 ± 19.1 | −38.8 ± 17.8 |
| D-1631 | 4957 | 1 | 4 | AAV3 | GalNAc | Liver | −32.1 ± 10.7 | −26.1 ± 17.3 | −38.3 ± 15.5 |
| D-1614 | 4999 | 1 | 4 | AAV3 | GalNAc | Liver | −53.2 ± 12.8 | −49.7 ± 17 | −56.2 ± 9 |
| D-1611 | 5043 | 1 | 4 | AAV3 | GalNAc | Liver | −34.3 ± 33.8 | −33.3 ± 32 | −44.5 ± 21.2 |
| D-1612 | 5045 | 1 | 4 | AAV3 | GalNAc | Liver | −31.1 ± 27.1 | −30.1 ± 27.3 | −34.5 ± 18.5 |
| D-1597 | 1333 | 3 | 4 | AAV1 | GalNAc | Liver | −72.3 ± 10.6 | −69.5 ± 12.8 | −72.2 ± 7.4 |
| D-1615 | 1678 | 3 | 4 | AAV1 | GalNAc | Liver | −65.5 ± 6.1 | −63.2 ± 7 | −63.9 ± 4.7 |
| D-1631 | 4957 | 3 | 4 | AAV3 | GalNAc | Liver | −68 ± 6.9 | −65.3 ± 7.7 | −65.5 ± 7.2 |
| D-1614 | 4999 | 3 | 4 | AAV3 | GalNAc | Liver | −67.3 ± 2.4 | −64.9 ± 2.6 | −65.2 ± 0.6 |
| D-1611 | 5043 | 3 | 4 | AAV3 | GalNAc | Liver | −66.8 ± 17.1 | −65.2 ± 17.7 | −66.4 ± 14.9 |
| D-1612 | 5045 | 3 | 4 | AAV3 | GalNAc | Liver | −83 ± 13 | −82.2 ± 14 | −82.6 ± 14.2 |
| D-1694 | 1333 | 20 | 4 | AAV1 | C22 | Liver | −73.3 ± 9.4 | −71.3 ± 10.4 | −72.2 ± 3.7 |
| D-1695 | 1678 | 20 | 4 | AAV1 | C22 | Liver | −51.9 ± 33.7 | −51 ± 33.5 | −56.8 ± 29.8 |
| D-1696 | 4957 | 20 | 4 | AAV3 | C22 | Liver | −34.7 ± 29.7 | −34.3 ± 31.1 | −43.6 ± 21.4 |
| D-1697 | 4999 | 20 | 4 | AAV3 | C22 | Liver | −3.3 ± 53.7 | 1.1 ± 55.4 | −18.9 ± 43.9 |
| D-1698 | 5043 | 20 | 4 | AAV3 | C22 | Liver | −32.6 ± 15.1 | −31 ± 15.9 | −43.7 ± 10.3 |
| D-1699 | 5045 | 20 | 4 | AAV3 | C22 | Liver | −18.6 ± 16.2 | −18.7 ± 13.7 | −28.2 ± 11.7 |
| D-1694 | 1333 | 20 | 4 | AAV1 | C22 | Adipose | −66.4 ± 8 | −67.6 ± 9.6 | −75.2 ± 7 |
| D-1695 | 1678 | 20 | 4 | AAV1 | C22 | Adipose | −19 ± 55.4 | −17.5 ± 59.3 | −43.7 ± 43 |
| D-1696 | 4957 | 20 | 4 | AAV3 | C22 | Adipose | −75.6 ± 34.8 | −75.3 ± 34.7 | −78.1 ± 27.5 |
| D-1697 | 4999 | 20 | 4 | AAV3 | C22 | Adipose | −79.7 ± 5.8 | −78.5 ± 6.4 | −73.2 ± 9.1 |
| D-1698 | 5043 | 20 | 4 | AAV3 | C22 | Adipose | −69 ± 21.9 | −67.5 ± 25.3 | −68.4 ± 19.7 |
| D-1699 | 5045 | 20 | 4 | AAV3 | C22 | Adipose | −72.2 ± 15.9 | −69.1 ± 19.5 | −54.4 ± 17.1 |

TABLE 9
siRNA Efficacy in Liver and Adipose Tissue 4 Weeks Following siRNA Injection

| SIRNA | Trigger | Dose | | AAV | | | Avg. % Change in mRNA ± STD | | |
|---|---|---|---|---|---|---|---|---|---|
| Duplex | Family | (mg/kg) | N | No. | Carrier | Tissue | eGFP-1 | eGFP-2 | BGHpA |
| D-1557 | 3000 | 3 | 4 | AAV2 | GalNAc | Liver | −52.1 ± 15.3 | −51.3 ± 15.8 | −46.9 ± 19.4 |
| D-1650 | 3000 | 3 | 4 | AAV2 | GalNAc | Liver | −54.1 ± 10 | −53.1 ± 10.5 | −52.4 ± 15.2 |
| D-1655 | 3000 | 3 | 4 | AAV2 | GalNAc | Liver | −44.6 ± 9.6 | −42.8 ± 10 | −42.3 ± 7.1 |
| D-1660 | 3000 | 3 | 4 | AAV2 | GalNAc | Liver | −39.3 ± 8.9 | −42.9 ± 3.7 | −43.4 ± 8.3 |
| D-1665 | 3000 | 3 | 4 | AAV2 | GalNAc | Liver | −20.5 ± 22 | −19.6 ± 21.1 | −22.1 ± 17.8 |
| D-1586 | 3133 | 3 | 4 | AAV2 | GalNAc | Liver | −38.6−9.4 | −36.8 ± 8.5 | −40 ± 2.3 |
| D-1649 | 3133 | 3 | 4 | AAV2 | GalNAc | Liver | −43.4 ± 5.6 | −37.6 ± 6.5 | −42.5 ± 12.4 |
| D-1654 | 3133 | 3 | 4 | AAV2 | GalNAc | Liver | −27.4 ± 46.7 | −22 ± 49.3 | −20.8 ± 46.1 |
| D-1659 | 3133 | 3 | 4 | AAV2 | GalNAc | Liver | −41.5 ± 2.9 | −36.8 ± 5.7 | −42.1 ± 6.3 |
| D-1664 | 3133 | 3 | 4 | AAV2 | GalNAc | Liver | −43.7 ± 14.8 | −41.6 ± 15.9 | −45.5 ± 12.1 |
| D-1669 | 3133 | 3 | 4 | AAV2 | GalNAc | Liver | −45.7 ± 27.1 | −40.7 ± 29.6 | −46.4 ± 28.6 |
| D-1623 | 5080 | 3 | 4 | AAV3 | GalNAc | Liver | −27.1 ± 25.9 | −22.4 ± 30.4 | −27.1 ± 24.9 |
| D-1643 | 2080 | 20 | 4 | AAV1 | C22 | Liver | −14.9 ± 19.5 | −14.6 ± 21.1 | −11.6 ± 17.1 |
| D-1671 | 2080 | 20 | 4 | AAV1 | C22 | Liver | −20.1 ± 23.6 | −20.5 ± 23.4 | −17 ± 25.9 |
| D-1675 | 2080 | 20 | 4 | AAV1 | C22 | Liver | −32.6 ± 11.2 | −31.9 ± 14 | −19.5 ± 15.8 |
| D-1680 | 2080 | 20 | 4 | AAVI | C22 | Liver | −52.1 ± 13.6 | −50 ± 12.9 | −42.1 ± 11.9 |
| D-1685 | 2080 | 20 | 4 | AAV1 | C22 | Liver | −54 ± 25.8 | −53.5 ± 26.2 | −46.7 ± 29 |
| D-1690 | 2080 | 20 | 4 | AAVI | C22 | Liver | −40 ± 10.9 | −36.2 ± 8.7 | −33.9 ± 13.3 |
| D-1636 | 2144 | 20 | 4 | AAV1 | C22 | Liver | −48.8 ± 30 | −44.2 ± 33.6 | −40.9 ± 33.7 |
| D-1672 | 2144 | 20 | 4 | AAV1 | C22 | Liver | −11 ± 16.5 | −7.5 ± 16.9 | −20 ± 6.3 |
| D-1677 | 2144 | 20 | 4 | AAV1 | C22 | Liver | −23.6 ± 9.1 | −20.2 ± 7.2 | −17.5 ± 9.3 |
| D-1682 | 2144 | 20 | 4 | AAV1 | C22 | Liver | −14.4 ± 9.8 | −13 ± 9.2 | −29.9 ± 5.7 |
| D-1687 | 2144 | 20 | 4 | AAV1 | C22 | Liver | −59.5 ± 33.4 | −61 ± 32.4 | −74.3 ± 18.5 |
| D-1692 | 2144 | 20 | 4 | AAVI | C22 | Liver | −60.5 ± 21.6 | −60.1 ± 23.3 | −73 ± 6.7 |
| D-1846 | 5080 | 20 | 4 | AAV3 | C22 | Liver | −76.6 ± 36 | −79.6 ± 29.9 | −83.5 ± 27.2 |
| D-1643 | 2080 | 20 | 4 | AAVI | C22 | Adipose | −53.4 ± 23.5 | −55.1 ± 23.9 | −65.8 ± 16.6 |
| D-1671 | 2080 | 20 | 4 | AAV1 | C22 | Adipose | −74.9 ± 7.5 | −79.2 ± 5 | −76.1 ± 10.3 |
| D-1675 | 2080 | 20 | 4 | AAV1 | C22 | Adipose | −64.9 ± 14.4 | −67.8 ± 14.9 | −71 ± 13.7 |
| D-1680 | 2080 | 20 | 4 | AAVI | C22 | Adipose | −69.6 ± 26.1 | −66.3 ± 29 | −83.1 ± 11.1 |
| D-1685 | 2080 | 20 | 4 | AAV1 | C22 | Adipose | −70.2 ± 32 | −67.3 ± 35.7 | −80.4 ± 20 |
| D-1690 | 2080 | 20 | 4 | AAV1 | C22 | Adipose | −81.5 ± 11.6 | −82.6 ± 10.5 | −82.1 ± 16.7 |
| D-1636 | 2144 | 20 | 4 | AAV1 | C22 | Adipose | −65.7 ± 40.7 | −60 ± 47.4 | −78.5 ± 26.6 |
| D-1672 | 2144 | 20 | 4 | AAV1 | C22 | Adipose | −63.3 ± 21.1 | −65.6 ± 19.9 | −59.1 ± 27.6 |
| D-1677 | 2144 | 20 | 4 | AAV1 | C22 | Adipose | −44.2 ± 19.2 | −35.8 ± 26 | −56.6 ± 18.2 |
| D-1682 | 2144 | 20 | 4 | AAV1 | C22 | Adipose | −85.5 ± 7.7 | −81.1 ± 8.9 | −78.3 ± 14 |
| D-1687 | 2144 | 20 | 4 | AAV1 | C22 | Adipose | −52.1 ± 15.3 | −51.3 ± 15.8 | −46.9 ± 19.4 |
| D-1692 | 2144 | 20 | 4 | AAV1 | C22 | Adipose | −54.1 ± 10 | −53.1 ± 10.5 | −52.4 ± 15.2 |
| D-1846 | 5080 | 20 | 4 | AAV3 | C22 | Adipose | −44.6 ± 9.6 | −42.8 ± 10 | −42.3 ± 7.1 |

TABLE 10
siRNA Efficacy in Liver 4 Weeks Following siRNA Injection

| SIRNA | Trigger | Dose | | AAV | | Avg. % Change in mRNA ± STD | | |
|---|---|---|---|---|---|---|---|---|
| Duplex | Family | (mg/kg) | N | No. | Carrier | eGFP-1 | eGFP-2 | BGHpA |
| D-1597 | 1333 | 3 | 4 | 1 | GalNAc | −57.5 ± 17.2 | −54.9 ± 17.5 | −55.1 ± 15.5 |
| D-1721 | 1333 | 3 | 4 | 1 | GalNAc | −35.5 ± 4 | −31.5 ± 8.3 | −34 ± 3.1 |
| D-1728 | 1333 | 3 | 4 | 1 | GalNAc | −32.5 ± 18.5 | −28.1 ± 18.5 | −36.8 ± 13.8 |
| D-1735 | 1333 | 3 | 4 | 1 | GalNAc | −36.3 ± 11.7 | −35 ± 7.2 | −36.3 ± 8.6 |
| D-1707 | 1333 | 3 | 4 | 1 | GalNAc | −37.8 ± 10.4 | −39.3 ± 9.7 | −34.5 ± 4.1 |
| D-1714 | 1333 | 3 | 4 | 1 | GalNAc | −50.6 ± 18.8 | −49.1 ± 19.4 | −45.8 ± 18 |
| D-1700 | 1333 | 3 | 4 | 1 | GalNAc | −44.5 ± 15.2 | −40.9 ± 17.9 | −45.8 ± 18.5 |
| D-1615 | 1678 | 3 | 4 | 1 | GalNAc | −53.7 ± 19.8 | −52 ± 20.9 | −47.8 ± 14.9 |
| D-1722 | 1678 | 3 | 4 | 1 | GalNAc | −45.8 ± 22 | −40.4 ± 24.7 | −46.9 ± 14.7 |
| D-1729 | 1678 | 3 | 4 | 1 | GalNAc | −31.8 ± 15.6 | −27.5 ± 16.4 | −43.2 ± 4.9 |
| D-1736 | 1678 | 3 | 4 | 1 | GalNAc | −51.7 ± 8.2 | −50.6 ± 7.3 | −43.2 ± 5.4 |
| D-1708 | 1678 | 3 | 4 | 1 | GalNAc | −36.1 ± 9.7 | −32.3 ± 11.1 | −35.2 ± 9.7 |
| D-1715 | 1678 | 3 | 4 | 1 | GalNAc | −28.1 ± 28.8 | −22.6 ± 30.8 | −32.9 ± 21 |
| D-1701 | 1678 | 3 | 4 | 1 | GalNAc | −27.8 ± 20.9 | −25.6 ± 18.1 | −17 ± 18.8 |
| D-1631 | 4957 | 3 | 4 | 3 | GalNAc | −55.3 ± 18.1 | −56.1 ± 19.4 | −52.7 ± 18.3 |
| D-1724 | 4957 | 3 | 4 | 3 | GalNAc | −62.3 ± 8.1 | −62.5 ± 7 | −59.1 ± 7.3 |
| D-1731 | 4957 | 3 | 4 | 3 | GalNAc | −64 ± 11.9 | −59.9 ± 14.4 | −58.9 ± 15.6 |
| D-1738 | 4957 | 3 | 4 | 3 | GalNAc | −42.1 ± 9.4 | −40.2 ± 11.3 | −46.7 ± 9 |
| D-1710 | 4957 | 3 | 4 | 3 | GalNAc | −57.9 ± 6.3 | −57.3 ± 6.3 | −49.7 ± 4.3 |
| D-1717 | 4957 | 3 | 4 | 3 | GalNAc | −61.4 ± 24.8 | −58.5 ± 28.6 | −59.3 ± 23.8 |
| D-1703 | 4957 | 3 | 4 | 3 | GalNAc | −61.2 ± 10 | −62.1 ± 9 | −54.3 ± 12.5 |
| D-1614 | 4999 | 3 | 4 | 3 | GalNAc | −71 ± 21.5 | −70.7 ± 21.7 | −73.5 ± 16.8 |
| D-1723 | 4999 | 3 | 4 | 3 | GalNAc | −70.8 ± 3.4 | −70 ± 2.2 | −60.8 ± 1.5 |
| D-1730 | 4999 | 3 | 4 | 3 | GalNAc | −72.4 ± 15 | −72.5 ± 16.2 | −67.2 ± 11.7 |
| D-1737 | 4999 | 3 | 4 | 3 | GalNAc | −71.5 ± 3.9 | −74.5 ± 5 | −65.1 ± 1.5 |
| D-1709 | 4999 | 3 | 4 | 3 | GalNAc | −73 ± 5 | −71.6 ± 5.3 | −67.5 ± 6.2 |
| D-1716 | 4999 | 3 | 4 | 3 | GalNAc | −76 ± 4 | −75.5 ± 4.2 | −69.4 ± 4.1 |
| D-1702 | 4999 | 3 | 4 | 3 | GalNAc | −72.7 ± 4.9 | −72.1 ± 4.7 | −67.9 ± 2.1 |
| D-1611 | 5043 | 3 | 4 | 3 | GalNAc | −71.6 ± 11.4 | −69.4 ± 12 | −65.2 ± 10.6 |
| D-1726 | 5043 | 3 | 4 | 3 | GalNAc | −59.8 ± 17.1 | −57.3 ± 18.3 | −58.8 ± 13.7 |
| D-1733 | 5043 | 3 | 4 | 3 | GalNAc | −70.8 ± 8.1 | −68.3 ± 9.2 | −64.3 ± 8.7 |
| D-1740 | 5043 | 3 | 4 | 3 | GalNAc | −61.6 ± 10.8 | −57.9 ± 12.3 | −56.6 ± 6.9 |
| D-1712 | 5043 | 3 | 4 | 3 | GalNAc | −67.8 ± 9 | −64.7 ± 10.4 | −69.6 ± 6.3 |
| D-1719 | 5043 | 3 | 4 | 3 | GalNAc | −69.4 ± 6.2 | −68.9 ± 5.6 | −68.1 ± 3.3 |
| D-1705 | 5043 | 3 | 4 | 3 | GalNAc | −81.4 ± 4.9 | −77.9 ± 8.8 | −79.7 ± 8.6 |
| D-1612 | 5045 | 3 | 3 | 3 | GalNAc | −67.5 ± 15.5 | −69.6 ± 14.1 | −75.3 ± 7.4 |
| D-1725 | 5045 | 3 | 4 | 3 | GalNAc | −64.8 ± 5.2 | −66.7 ± 5.4 | −67.1 ± 3.8 |
| D-1732 | 5045 | 3 | 4 | 3 | GalNAc | −66 ± 9.9 | −64.2 ± 10.6 | −69.5 ± 5.7 |
| D-1739 | 5045 | 3 | 4 | 3 | GalNAc | −66.8 ± 12.9 | −65.5 ± 14.7 | −67.6 ± 11 |
| D-1711 | 5045 | 3 | 4 | 3 | GalNAc | −75.7 ± 6.7 | −75.8 ± 5.1 | −71.5 ± 5.1 |
| D-1718 | 5045 | 3 | 4 | 3 | GalNAc | −76.6 ± 4.1 | −75.7 ± 4.4 | −75.6 ± 2.8 |
| D-1704 | 5045 | 3 | 4 | 3 | GalNAc | −80.1 ± 12.2 | −80.1 ± 12.1 | −79.9 ± 12.4 |
| D-1623 | 5080 | 3 | 4 | 3 | GalNAc | −72.9 ± 7.6 | −72.6 ± 7.1 | −75.9 ± 7.1 |
| D-1727 | 5080 | 3 | 4 | 3 | GalNAc | −59 ± 3.6 | −53.4 ± 12.7 | −49.3 ± 20.9 |
| D-1734 | 5080 | 3 | 4 | 3 | GalNAc | −59.6 ± 7.4 | −60.3 ± 7 | −61.2 ± 6.2 |
| D-1741 | 5080 | 3 | 4 | 3 | GalNAc | −59.9 ± 4.8 | −59.4 ± 4.1 | −61 ± 5.8 |
| D-1713 | 5080 | 3 | 4 | 3 | GalNAc | −67.9 ± 11.1 | −67.5 ± 8.7 | −69 ± 4.9 |
| D-1720 | 5080 | 3 | 4 | 3 | GalNAc | −55.3 ± 6.4 | −57 ± 6.5 | −60.7 ± 5.6 |
| D-1706 | 5080 | 3 | 4 | 3 | GalNAc | −66.2 ± 9 | −67.7 ± 7.8 | −69.1 ± 6.7 |

TABLE 11
siRNA Efficacy in Liver and Adipose Tissue 4 Weeks Following siRNA Injection

| SIRNA | Trigger | Dose | | AAV | | | Avg. % Change in mRNA ± STD | | |
|---|---|---|---|---|---|---|---|---|---|
| Duplex | Family | (mg/kg) | N | No. | Carrier | Tissue | eGFP-1 | eGFP-2 | BGHpA |
| D-1714 | 1333 | 3 | 4 | 1 | GalNAc | Liver | −50.6 ± 13.9 | −49.2 ± 14.5 | −46.6 ± 17.4 |
| D-1615 | 1678 | 3 | 4 | 1 | GalNAc | Liver | −52.5 ± 11.4 | −53.1 ± 10.4 | −57.9 ± 6.1 |
| D-1736 | 1678 | 3 | 4 | 1 | GalNAc | Liver | −44.9 ± 8.9 | −43.1 ± 9.7 | −50 ± 7.7 |
| D-1648 | 2144 | 3 | 4 | 1 | GalNAc | Liver | −39.4 ± 13 | −37.3 ± 13.2 | −38.5 ± 10.9 |
| D-1557 | 3000 | 3 | 4 | 2 | GalNAc | Liver | −45.8 ± 11 | −44.6 ± 12.7 | −46.8 ± 13.2 |
| D-1650 | 3000 | 3 | 4 | 2 | GalNAc | Liver | −32.2 ± 30.3 | −27.5 ± 32.7 | −35.5 ± 20.2 |
| D-1664 | 3133 | 3 | 4 | 2 | GalNAc | Liver | −38.4 ± 23.9 | −31.8 ± 26.2 | −46.1 ± 11.7 |
| D-1614 | 4999 | 3 | 4 | 3 | GalNAc | Liver | −66.3 ± 13 | −59.8 ± 14.3 | −58.7 ± 13.9 |
| D-1723 | 4999 | 3 | 4 | 3 | GalNAc | Liver | −65.3 ± 16.8 | −58.7 ± 19 | −58.5 ± 14.9 |
| D-1737 | 4999 | 3 | 4 | 3 | GalNAc | Liver | −57.2 ± 22.1 | −51.3 ± 21 | −47.9 ± 15.1 |
| D-1730 | 4999 | 3 | 4 | 3 | GalNAc | Liver | −61 ± 24.9 | −56.6 ± 25.7 | −48.8 ± 24 |
| D-1709 | 4999 | 3 | 4 | 3 | GalNAc | Liver | −73 ± 6.3 | −67.4 ± 8 | −68.1 ± 16.8 |
| D-1716 | 4999 | 3 | 4 | 3 | GalNAc | Liver | −64.8 ± 14.9 | −57.1 ± 19.5 | −56.6 ± 10.9 |
| D-1702 | 4999 | 3 | 3 | 3 | GalNAc | Liver | −55.6 ± 13.3 | −45.7 ± 15.6 | −50.4 ± 7.6 |
| D-1879 | 4999 | 3 | 4 | 3 | GalNAc | Liver | −70.1 ± 10.9 | −62.6 ± 13.7 | −55.6 ± 15.7 |
| D-1611 | 5043 | 3 | 4 | 3 | GalNAc | Liver | −77.2 ± 9.6 | −78.2 ± 9.1 | −69.5 ± 13.8 |
| D-1733 | 5043 | 3 | 4 | 3 | GalNAc | Liver | −75.3 ± 9.1 | −75.7 ± 9.3 | −69.2 ± 10.8 |
| D-1719 | 5043 | 3 | 4 | 3 | GalNAc | Liver | −70.9 ± 14 | −71.2 ± 12.7 | −70.9 ± 9.4 |
| D-1705 | 5043 | 3 | 4 | 3 | GalNAc | Liver | −75.7 ± 10.3 | −76.7 ± 9.8 | −74.4 ± 7.9 |
| D-1612 | 5045 | 3 | 3 | 3 | GalNAc | Liver | −72.1 ± 6 | −71.2 ± 5.3 | −65.2 ± 7.2 |
| D-1711 | 5045 | 3 | 4 | 3 | GalNAc | Liver | −73 ± 3.8 | −72.4 ± 3.4 | −70.4 ± 4.4 |
| D-1718 | 5045 | 3 | 4 | 3 | GalNAc | Liver | −75.4 ± 14.3 | −75.4 ± 14.5 | −70.1 ± 16.3 |
| D-1704 | 5045 | 3 | 4 | 3 | GalNAc | Liver | −76.4 ± 5.3 | −73.9 ± 6.2 | −71.6 ± 5.6 |
| D-1876 | 5045 | 20 | 4 | 3 | C22 | Liver | −31 ± 19.2 | −34 ± 17.4 | −38 ± 14.6 |
| D-1623 | 5080 | 3 | 3 | 3 | GalNAc | Liver | −71.4 ± 3.3 | −65.6 ± 4.9 | −65.9 ± 2.3 |
| D-1706 | 5080 | 3 | 4 | 3 | GalNAc | Liver | 64.9 ± 12.7 | −63.6 ± 16.6 | 64.9 ± 8.5 |
| D-1873 | 1333 | 20 | 4 | 1 | C22 | Liver | −37.5 ± 21.5 | −33 ± 24.6 | −53.8 ± 12.3 |
| D-1695 | 1678 | 20 | 4 | 1 | C22 | Liver | −22 ± 15.4 | −22.4 ± 13.1 | −31.6 ± 12.9 |
| D-1867 | 1678 | 20 | 3 | 1 | C22 | Liver | −48.2 ± 10.4 | −49.7 ± 6.3 | −51.4 ± 5.3 |
| D-1672 | 2144 | 20 | 4 | 1 | C22 | Liver | −48 ± 17.3 | −47.1 ± 17.8 | −49.6 ± 15.8 |
| D-1642 | 3000 | 20 | 4 | 2 | C22 | Liver | −38 ± 15.5 | −35.7 ± 16.1 | −36.2 ± 9.4 |
| D-1674 | 3000 | 20 | 3 | 2 | C22 | Liver | −44.8 ± 11.5 | −45.9 ± 9 | 45.3 ± 15.1 |
| D-1688 | 3133 | 20 | 4 | 2 | C22 | Liver | −41 ± 28.5 | −32.2 ± 32.9 | −47.4 ± 21.9 |
| D-1697 | 4999 | 20 | 4 | 3 | C22 | Liver | −22.4 ± 23 | −14 ± 27.2 | −15.4 ± 25.6 |
| D-1865 | 4999 | 20 | 4 | 3 | C22 | Liver | −16.8 ± 47.2 | −4.9 ± 53.2 | −14.1 ± 33.6 |
| D-1863 | 4999 | 20 | 4 | 3 | C22 | Liver | −0.6 ± 33.2 | 16.7 ± 46.2 | 1.2 ± 32.6 |
| D-1866 | 4999 | 20 | 4 | 3 | C22 | Liver | −11.7 ± 61.1 | −2.2 ± 65.8 | −7.8 ± 45.2 |
| D-1869 | 4999 | 20 | 4 | 3 | C22 | Liver | −78 ± 7.7 | −73.1 ± 9.9 | −66.4 ± 9.2 |
| D-1872 | 4999 | 20 | 4 | 3 | C22 | Liver | 65.6 ± 11.2 | −56.5 ± 14.2 | −54.4 ± 12.2 |
| D-1877 | 4999 | 20 | 4 | 3 | C22 | Liver | −68.4 ± 7.9 | −60.1 ± 12.1 | −58 ± 11.8 |
| D-1878 | 4999 | 20 | 3 | 3 | C22 | Liver | −58.2 ± 9.1 | −49.9 ± 8.6 | −52.2 ± 7.5 |
| D-1698 | 5043 | 20 | 4 | 3 | C22 | Liver | −72.2 ± 15 | −72.8 ± 15.1 | −70.5 ± 18.3 |
| D-1864 | 5043 | 20 | 4 | 3 | C22 | Liver | −35.4 ± 11.3 | −39.2 ± 8.5 | −41.2 ± 12.7 |
| D-1870 | 5043 | 20 | 4 | 3 | C22 | Liver | −30.4 ± 11.4 | −25.1 ± 9.3 | −32.1 ± 8.7 |
| D-1875 | 5043 | 20 | 4 | 3 | C22 | Liver | −61.5 ± 19.5 | −61.1 ± 20.5 | −60.9 ± 18.2 |
| D-1699 | 5045 | 20 | 4 | 3 | C22 | Liver | −40.1 ± 10.8 | −42.4 ± 10.7 | −38.2 ± 9.6 |
| D-1868 | 5045 | 20 | 4 | 3 | C22 | Liver | −52.7 ± 11.7 | −45.4 ± 11.3 | −48.7 ± 8.4 |
| D-1871 | 5045 | 20 | 4 | 3 | C22 | Liver | −65.4 ± 5.2 | −65.3 ± 4 | −66.8 ± 5.2 |
| D-1846 | 5080 | 20 | 4 | 3 | C22 | Liver | −25.8 ± 17.6 | −12.7 ± 20.8 | −22.9 ± 17.3 |
| D-1874 | 5080 | 20 | 4 | 3 | C22 | Liver | 41.6 ± 10.4 | −36.9 ± 11.9 | −40.6 ± 7.5 |
| D-1873 | 1333 | 20 | 4 | 1 | C22 | Adipose | 37.4 ± 68 | 31.4 ± 63.8 | 6.3 ± 35.5 |
| D-1695 | 1678 | 20 | 4 | 1 | C22 | Adipose | −19.2 ± 12.7 | −28 ± 12.9 | −25.3 ± 7.2 |
| D-1867 | 1678 | 20 | 3 | 1 | C22 | Adipose | −67.3 ± 35.7 | −69.4 ± 35.3 | −71.5 ± 24.1 |
| D-1672 | 2144 | 20 | 4 | 1 | C22 | Adipose | −43 ± 26.1 | −43.1 ± 31.7 | −32.6 ± 37.7 |
| D-1642 | 3000 | 20 | 4 | 2 | C22 | Adipose | −37.2 ± 40.5 | −30.3 ± 45.9 | −15.8 ± 61.1 |
| D-1674 | 3000 | 20 | 3 | 2 | C22 | Adipose | −70.7 ± 19.9 | −68.6 ± 21.7 | −71.4 ± 19.9 |
| D-1688 | 3133 | 20 | 4 | 2 | C22 | Adipose | −39.6 ± 18.4 | −39.7 ± 21.7 | −28.9 ± 44.3 |
| D-1697 | 4999 | 20 | 4 | 3 | C22 | Adipose | −85.9 ± 7.3 | −89.5 ± 5.6 | −81.5 ± 8.1 |
| D-1865 | 4999 | 20 | 4 | 3 | C22 | Adipose | −78.6 ± 25.5 | −78.2 ± 29.5 | −81.7 ± 21 |
| D-1863 | 4999 | 20 | 4 | 3 | C22 | Adipose | −84.6 ± 8.1 | −87.1 ± 6.9 | −72.9 ± 15.4 |
| D-1866 | 4999 | 20 | 4 | 3 | C22 | Adipose | −88.5 ± 10.9 | −91.6 ± 6.7 | −86.6 ± 13.3 |
| D-1869 | 4999 | 20 | 4 | 3 | C22 | Adipose | −90 ± 8.2 | −92.4 ± 6.7 | −85.3 ± 10.6 |
| D-1872 | 4999 | 20 | 4 | 3 | C22 | Adipose | −66.2 ± 15.1 | −75.9 ± 9.4 | −72.9 ± 11.9 |
| D-1877 | 4999 | 20 | 4 | 3 | C22 | Adipose | −73.7 ± 6.7 | −79.6 ± 5 | −62.8 ± 14.3 |
| D-1878 | 4999 | 20 | 3 | 3 | C22 | Adipose | −85.2 ± 12 | −88.8 ± 9.3 | −84.7 ± 10.5 |
| D-1698 | 5043 | 20 | 4 | 3 | C22 | Adipose | −93 ± 9 | −91.5 ± 11.3 | −91.4 ± 10.7 |
| D-1864 | 5043 | 20 | 4 | 3 | C22 | Adipose | −87.6 ± 7.4 | −86.7 ± 7.2 | −84.6 ± 9.5 |
| D-1870 | 5043 | 20 | 4 | 3 | C22 | Adipose | −81.6 ± 15.5 | −81 ± 16.7 | −80.5 ± 14 |
| D-1875 | 5043 | 20 | 4 | 3 | C22 | Adipose | −85.6 ± 9.1 | −86.9 ± 8.2 | −81.3 ± 12.9 |
| D-1699 | 5045 | 20 | 4 | 3 | C22 | Adipose | −78.8 ± 9.5 | −78.7 ± 10.6 | −79.8 ± 7.7 |
| D-1868 | 5045 | 20 | 4 | 3 | C22 | Adipose | −82 ± 9 | −79.4 ± 11.7 | −79.6 ± 9.2 |
| D-1871 | 5045 | 20 | 4 | 3 | C22 | Adipose | −90 ± 15.1 | −91.9 ± 12 | −90.9 ± 12.9 |
| D-1876 | 5045 | 20 | 4 | 3 | C22 | Adipose | −76 ± 24.4 | −76.9 ± 22.6 | −75.2 ± 25.4 |
| D-1846 | 5080 | 20 | 4 | 3 | C22 | Adipose | −82.9 ± 8.8 | −87.2 ± 7.7 | −75.9 ± 14.9 |
| D-1874 | 5080 | 20 | 4 | 3 | C22 | Adipose | −71.2 ± 9.7 | −72.8 ± 8.8 | −74.2 ± 5.7 |

TABLE 12
siRNA Efficacy in Liver and Adipose Tissue 4 Weeks Following siRNA Injection

| SIRNA | Trigger | Dose | | AAV | | | Avg. % Change in mRNA ± STD | | |
|---|---|---|---|---|---|---|---|---|---|
| Duplex | Family | (mg/kg) | N | No. | Carrier | Tissue | eGFP-1 | eGFP-2 | BGHpA |
| D-1686 | 1309 | 20 | 4 | 1 | C22 | Liver | −39.9 ± 38.8 | −39.9 ± 40.6 | −51 ± 29.2 |
| D-1691 | 1309 | 20 | 4 | 1 | C22 | Liver | −40.1 ± 18.4 | −40 ± 16.9 | −49.8 ± 10.6 |
| D-1635 | 1309 | 20 | 4 | 1 | C22 | Liver | −38.4 ± 30.6 | −38.8 ± 29.3 | −45.9 ± 19.5 |
| D-1694 | 1333 | 20 | 4 | 1 | C22 | Liver | −25 ± 20.4 | −26 ± 21.8 | −43.4 ± 13.7 |
| D-1695 | 1678 | 20 | 4 | 1 | C22 | Liver | −11.9 ± 10.8 | −14 ± 11.7 | −19.5 ± 17.5 |
| D-1643 | 2080 | 20 | 4 | 1 | C22 | Liver | −44.2 ± 17.3 | −44.1 ± 17.4 | −46.2 ± 11.4 |
| D-1672 | 2144 | 20 | 4 | 1 | C22 | Liver | −58.5 ± 9.6 | −55.6 ± 9.9 | −52 ± 10.2 |
| D-1636 | 2144 | 20 | 4 | 1 | C22 | Liver | −65.3 ± 31.3 | −66.3 ± 30.2 | −63.4 ± 32.9 |
| D-1847 | 1309 | 20 | 4 | 1 | C22 | Liver | −43 ± 14.5 | −39.9 ± 17.1 | −49.9 ± 12.1 |
| D-1849 | 1309 | 20 | 4 | 1 | C22 | Liver | −23.5 ± 13.9 | −19.6 ± 14.1 | −14.8 ± 11.6 |
| D-1859 | 1309 | 20 | 4 | 1 | C22 | Liver | −33.1 ± 15.6 | −33.3 ± 13.8 | −36.9 ± 15.7 |
| D-1853 | 1333 | 20 | 4 | 1 | C22 | Liver | −42.2 ± 22.9 | −41 ± 19.8 | −44.1 ± 20.7 |
| D-1852 | 1678 | 20 | 4 | 1 | C22 | Liver | −51.2 ± 21.2 | −44.9 ± 23.4 | −38 ± 21.7 |
| D-1860 | 2080 | 20 | 4 | 1 | C22 | Liver | −14.1 ± 23.1 | −11.5 ± 21.8 | −5.5 ± 34.2 |
| D-1851 | 2144 | 20 | 4 | 1 | C22 | Liver | −61.6 ± 15.8 | −55.8 ± 17.8 | −52.5 ± 16.3 |
| D-1858 | 2144 | 20 | 4 | 1 | C22 | Liver | −47.6 ± 10.8 | −44.7 ± 10.2 | −46.2 ± 1.9 |
| D-1666 | 4999 | 20 | 4 | 3 | C22 | Liver | −35 ± 11.7 | −35.7 ± 11.2 | −38.6 ± 11.7 |
| D-1872 | 4999 | 20 | 4 | 3 | C22 | Liver | −78.4 ± 5.1 | −76.2 ± 6.1 | −71.3 ± 4.3 |
| D-1877 | 4999 | 20 | 4 | 3 | C22 | Liver | −84.6 ± 1.7 | −82.1 ± 1.9 | −79.9 ± 2.4 |
| D-1697 | 4999 | 20 | 4 | 3 | C22 | Liver | −40.9 ± 9.3 | −37.5 ± 10.5 | −38.9 ± 8.3 |
| D-1846 | 5080 | 20 | 4 | 3 | C22 | Liver | −43.3 ± 6.8 | 43.8 ± 6.3 | −40 ± 4.5 |
| D-1881 | 4999 | 20 | 4 | 3 | C22 | Liver | −80.2 ± 2.7 | −77.3 ± 3.3 | −71 ± 2.8 |
| D-1887 | 4999 | 20 | 4 | 3 | C22 | Liver | −83.2 ± 3.3 | −80.2 ± 3.8 | −75.6 ± 4.5 |
| D-1880 | 4999 | 20 | 4 | 3 | C22 | Liver | −83.6 ± 2.7 | −82.1 ± 2.8 | −81.5 ± 2.9 |
| D-1884 | 4999 | 20 | 4 | 3 | C22 | Liver | −88 ± 2.9 | −85.5 ± 3.2 | −86 ± 2.3 |
| D-1856 | 4999 | 20 | 4 | 3 | C22 | Liver | −82.3 ± 4.5 | −79.7 ± 5 | −74.3 ± 5.8 |
| D-1862 | 5080 | 20 | 4 | 3 | C22 | Liver | −72.3 ± 3.5 | −69.3 ± 4.1 | −65 ± 3.8 |
| D-1869 | 4999 | 20 | 4 | 3 | C22 | Liver | −78.8 ± 2.7 | −73.6 ± 2.9 | −68.7 ± 1 |
| D-1869 | 4999 | 10 | 4 | 3 | C22 | Liver | −72 ± 3.1 | −69.4 ± 2.9 | −67.1 ± 3.3 |
| D-1869 | 4999 | 5 | 4 | 3 | C22 | Liver | −63.3 ± 6.4 | −60.9 ± 6.8 | −57.3 ± 7 |
| D-1709 | 4999 | 3 | 4 | 3 | GalNAc | Liver | −81.1 ± 4 | −77.1 ± 4.7 | −75.4 ± 5.2 |
| D-1709 | 4999 | 1 | 4 | 3 | GalNAc | Liver | −42.9 ± 7 | −39 ± 7.6 | −43.8 ± 7.5 |
| D-1709 | 4999 | 0.5 | 4 | 3 | GalNAc | Liver | −60.9 ± 6 | −58.1 ± 5.9 | −57.8 ± 5.8 |
| D-1774 | 5276 | 3 | 4 | 3 | GalNAc | Liver | −66.1 ± 4.5 | −59.6 ± 5.6 | −57.6 ± 4.7 |
| D-1975 | 5276 | 20 | 4 | 3 | C22 | Liver | −73.5 ± 3.6 | −70.7 ± 3.5 | −65.4 ± 3.3 |
| D-1976 | 5276 | 20 | 3 | 3 | C22 | Liver | −80.2 ± 0.4 | −76.7 ± 0.3 | −69.3 ± 0.7 |
| D-1870 | 5043 | 20 | 4 | 3 | C22 | Liver | −49 ± 11.5 | −47.6 ± 11.6 | −49.4 ± 11 |
| D-1698 | 5043 | 20 | 4 | 3 | C22 | Liver | −10.2 ± 15.9 | −13.2 ± 16 | −27.4 ± 9.6 |
| D-1875 | 5043 | 20 | 4 | 3 | C22 | Liver | −41.9 ± 9 | −40.1 ± 10.4 | −44.8 ± 6.9 |
| D-1868 | 5045 | 20 | 4 | 3 | C22 | Liver | −33 ± 10.8 | −32.2 ± 11.1 | −35.7 ± 9.5 |
| D-1871 | 5045 | 20 | 4 | 3 | C22 | Liver | −26 ± 7.2 | −27.4 ± 7.4 | −27.7 ± 6.2 |
| D-1876 | 5045 | 20 | 4 | 3 | C22 | Liver | −32 ± 3.2 | −25.4 ± 2.7 | −29.9 ± 3.8 |
| D-1699 | 5045 | 20 | 4 | 3 | C22 | Liver | −22.6 ± 16.4 | −20.2 ± 16.8 | −21.4 ± 15.4 |
| D-1883 | 5043 | 20 | 4 | 3 | C22 | Liver | −64.8 ± 6.2 | −63.2 ± 6.4 | −64.8 ± 6 |
| D-1886 | 5043 | 20 | 4 | 3 | C22 | Liver | −73.5 ± 5.6 | −70.4 ± 6.6 | −70.9 ± 6.2 |
| D-1855 | 5045 | 20 | 4 | 3 | C22 | Liver | −61 ± 5.4 | −57.8 ± 6.1 | −53.2 ± 2.9 |
| D-1888 | 5045 | 20 | 4 | 3 | C22 | Liver | −68.3 ± 3.5 | −65.1 ± 2.8 | −67.2 ± 2.4 |
| D-1882 | 5045 | 20 | 4 | 3 | C22 | Liver | −69.1 ± 3.3 | −64.7 ± 5 | −63.7 ± 4.1 |
| D-1885 | 5045 | 20 | 4 | 3 | C22 | Liver | −66 ± 1.9 | −62.4 ± 2.1 | −59 ± 2 |
| D-1611 | 5043 | 3 | 4 | 3 | GalNAc | Liver | −70.5 ± 6.1 | −71.5 ± 6.1 | −70.3 ± 5.7 |
| D-1611 | 5043 | 1 | 4 | 3 | GalNAc | Liver | −17.9 ± 13.6 | −21.3 ± 15.3 | −28.7 ± 8.1 |
| D-1611 | 5043 | 0.5 | 4 | 3 | GalNAc | Liver | 5.7 ± 5.4 | −3.3 ± 4.3 | −5.7 ± 6.5 |
| D-1718 | 5045 | 3 | 4 | 3 | GalNAc | Liver | −63.1 ± 1.5 | −56.3 ± 1.9 | −62.1 ± 1.1 |
| D-1718 | 5045 | 1 | 4 | 3 | GalNAc | Liver | −37.8 ± 21.9 | −30.9 ± 26.4 | −33.7 ± 19.9 |
| D-1718 | 5045 | 0.5 | 4 | 3 | GalNAc | Liver | −21 ± 13.3 | −16.5 ± 16.5 | −21.2 ± 16.9 |
| D-1866 | 4999 | 20 | 4 | 3 | C22 | Adipose | −94.3 ± 1.3 | −93.9 ± 1.3 | −90.9 ± 1.4 |
| D-1873 | 4999 | 20 | 4 | 3 | C22 | Adipose | −94.3 ± 1.7 | −93.7 ± 1.8 | −89.8 ± 3.3 |
| D-1877 | 4999 | 20 | 4 | 3 | C22 | Adipose | −95 ± 1.7 | −94.7 ± 1.8 | −94.9 ± 1.7 |
| D-1697 | 4999 | 20 | 4 | 3 | C22 | Adipose | −96.9 ± 1.2 | −96.6 ± 1.4 | −96.1 ± 1.5 |
| D-1846 | 5080 | 20 | 4 | 3 | C22 | Adipose | −92.2 ± 2.4 | −90.8 ± 3 | −90.9 ± 2.6 |
| D-1881 | 4999 | 20 | 4 | 3 | C22 | Adipose | −97.3 ± 0.7 | −97.2 ± 0.7 | −96.6 ± 0.9 |
| D-1887 | 4999 | 20 | 4 | 3 | C22 | Adipose | −93.9 ± 4 | −93.2 ± 4.7 | −95.8 ± 2.3 |
| D-1880 | 4999 | 20 | 4 | 3 | C22 | Adipose | −96.1 ± 1.8 | −95.6 ± 2 | −96.3 ± 1.4 |
| D-1884 | 4999 | 20 | 4 | 3 | C22 | Adipose | −98.6 ± 0.5 | −98.5 ± 0.6 | −98.4 ± 0.5 |
| D-1856 | 4999 | 20 | 4 | 3 | C22 | Adipose | −98.3 ± 0.6 | −98.1 ± 0.7 | −97.5 ± 0.9 |
| D-1862 | 5080 | 20 | 4 | 3 | C22 | Adipose | −96.1 ± 1.2 | −95.7 ± 1.5 | −95.4 ± 1.2 |
| D-1869 | 4999 | 20 | 4 | 3 | C22 | Adipose | −93.9 ± 1.6 | −92.5 ± 2.2 | −92.8 ± 0.5 |
| D-1869 | 4999 | 10 | 4 | 3 | C22 | Adipose | −95.5 ± 1.3 | −94.8 ± 1.6 | −95.6 ± 1.3 |
| D-1869 | 4999 | 5 | 4 | 3 | C22 | Adipose | −87.7 ± 4.9 | −86.2 ± 5.1 | −88.6 ± 4.1 |
| D-1975 | 5276 | 20 | 4 | 3 | C22 | Adipose | −95.9 ± 1.4 | −95.2 ± 1.4 | −95.9 ± 1.3 |
| D-1976 | 5276 | 20 | 3 | 3 | C22 | Adipose | −94.1 ± 2.4 | −93.1 ± 2.6 | −92.2 ± 2.7 |
| D-1870 | 5043 | 20 | 4 | 3 | C22 | Adipose | −84.4 ± 6.6 | −85.6 ± 6.3 | −83.9 ± 6.8 |
| D-1698 | 5043 | 20 | 4 | 3 | C22 | Adipose | −70.8 ± 5.6 | −71.8 ± 5.3 | −63.4 ± 7.9 |
| D-1875 | 5043 | 20 | 4 | 3 | C22 | Adipose | −87.5 ± 4 | −88.9 ± 3.5 | −83.6 ± 6.1 |
| D-1868 | 5045 | 20 | 4 | 3 | C22 | Adipose | −72.1 ± 13.2 | −73.5 ± 13.3 | −68.2 ± 10.6 |
| D-1871 | 5045 | 20 | 4 | 3 | C22 | Adipose | −61.6 ± 12.1 | −64 ± 11.3 | −62.7 ± 6.2 |
| D-1876 | 5045 | 20 | 4 | 3 | C22 | Adipose | −82.3 ± 5.1 | −82.5 ± 5.1 | −71.8 ± 6.4 |
| D-1699 | 5045 | 20 | 4 | 3 | C22 | Adipose | −81.5 ± 4.5 | −82.6 ± 4.6 | −65.5 ± 10.1 |
| D-1883 | 5043 | 20 | 4 | 3 | C22 | Adipose | −90 ± 5.9 | −90.7 ± 5.7 | −85.9 ± 8.2 |
| D-1886 | 5043 | 20 | 4 | 3 | C22 | Adipose | −84.9 ± 7.6 | −84 ± 7.9 | −81.7 ± 9.8 |
| D-1855 | 5045 | 20 | 4 | 3 | C22 | Adipose | −76.9 ± 8.7 | −77.7 ± 8.4 | −68.8 ± 5.7 |
| D-1888 | 5045 | 20 | 4 | 3 | C22 | Adipose | −82.1 ± 3 | −83.1 ± 3 | −70.2 ± 5 |
| D-1882 | 5045 | 20 | 4 | 3 | C22 | Adipose | −74.7 ± 6.7 | −74.7 ± 6.7 | −59.7 ± 9.4 |
| D-1885 | 5045 | 20 | 4 | 3 | C22 | Adipose | −86.1 ± 1.6 | −86.8 ± 1.6 | −78.6 ± 3 |

TABLE 13
siRNA Efficacy in Liver 4 Weeks Following siRNA Injection

| SIRNA | Trigger | Dose | | | | Avg. % Change in mRNA ± STD | | |
|---|---|---|---|---|---|---|---|---|
| Duplex | Family | (mg/kg) | N | AAV No. | Carrier | eGFP-1 | eGFP-2 | BGHpA |
| D-1933 | 1514 | 3 | 4 | 1 | GalNAc | 3.7 ± 14.8 | 12.5 ± 17 | 2.9 ± 18.1 |
| D-1939 | 1514 | 3 | 4 | 1 | GalNAc | 18.7 ± 10.1 | 23.6 ± 11.5 | 21.7 ± 15.2 |
| D-1945 | 1514 | 3 | 4 | 1 | GalNAc | −33.5 ± 16.6 | −26.5 ± 18.2 | −25.2 ± 9.8 |
| D-1951 | 1514 | 3 | 4 | 1 | GalNAc | 7.5 ± 65.3 | 15.5 ± 67.9 | 4.3 ± 46.6 |
| D-1957 | 1514 | 3 | 4 | 1 | GalNAc | 12.1 ± 38.9 | 17.4 ± 37.8 | 5.6 ± 35.6 |
| D-1963 | 1514 | 3 | 4 | 1 | GalNAc | −7.4 ± 45.8 | 4.7 ± 55.1 | −11.4 ± 41.8 |
| D-1969 | 1514 | 3 | 4 | 1 | GalNAc | −12.6 ± 14.6 | −6.2 ± 11.6 | −7.7 ± 12 |
| D-1820 | 1514 | 3 | 4 | 1 | GalNAc | −24.8 ± 19 | −14.5 ± 27.1 | −17.8 ± 21.1 |
| D-1938 | 2343 | 3 | 4 | 1 | GalNAc | −37.7 ± 14.9 | −32.9 ± 17.1 | −13.3 ± 22.1 |
| D-1944 | 2343 | 3 | 4 | 1 | GalNAc | −35 ± 3.2 | −26 ± 7.1 | −21 ± 16.2 |
| D-1950 | 2343 | 3 | 4 | 1 | GalNAc | −18.4 ± 11 | −9.8 ± 10.8 | −9.8 ± 7.6 |
| D-1956 | 2343 | 3 | 4 | 1 | GalNAc | −48.5 ± 43 | −42.3 ± 51.4 | −40.4 ± 49.1 |
| D-1962 | 2343 | 3 | 4 | 1 | GalNAc | −10.4 ± 19.6 | 2.8 ± 27.4 | −10.1 ± 19.3 |
| D-1968 | 2343 | 3 | 4 | 1 | GalNAc | −44.2 ± 16.5 | −36.9 ± 20 | −27 ± 21.7 |
| D-1974 | 2343 | 3 | 4 | 1 | GalNAc | −52.5 ± 5.8 | −46.5 ± 4.2 | −33.5 ± 6.4 |
| D-1810 | 2343 | 3 | 4 | 1 | GalNAc | −42.8 ± 41.3 | −38.5 ± 44.2 | −30 ± 47.6 |
| D-1935 | 2417 | 3 | 4 | 1 | GalNAc | −20.7 ± 16.2 | −13.1 ± 23.6 | −34.4 ± 16.2 |
| D-1941 | 2417 | 3 | 4 | 1 | GalNAc | −27.7 ± 27.6 | −24.9 ± 29.4 | −28.4 ± 29.4 |
| D-1947 | 2417 | 3 | 4 | 1 | GalNAc | −24 ± 41.1 | −18.9 ± 46.2 | −28.4 ± 32.2 |
| D-1953 | 2417 | 3 | 4 | 1 | GalNAc | −48.3 ± 21.8 | −40.7 ± 25.3 | −54.8 ± 16.5 |
| D-1959 | 2417 | 3 | 4 | 1 | GalNAc | −31.3 ± 10.2 | −27.3 ± 8.9 | −42.4 ± 9.6 |
| D-1965 | 2417 | 3 | 4 | 1 | GalNAc | −30.7 ± 13.8 | −25.7 ± 13.8 | −33.8 ± 12 |
| D-1971 | 2417 | 3 | 4 | 1 | GalNAc | −25 ± 22 | −10.9 ± 28.5 | −25.4 ± 33 |
| D-1812 | 2417 | 3 | 4 | 1 | GalNAc | −29.2 ± 17.7 | −27 ± 17.8 | −39 ± 14 |
| D-1937 | 4412 | 3 | 3 | 3 | GalNAc | −74 ± 6.9 | −70.8 ± 6.4 | −66.4 ± 6.8 |
| D-1943 | 4412 | 3 | 4 | 3 | GalNAc | −68 ± 12.7 | −64.2 ± 15 | −66.3 ± 11 |
| D-1949 | 4412 | 3 | 4 | 3 | GalNAc | −54.8 ± 7.8 | −52.2 ± 6.7 | −55.5 ± 5.7 |
| D-1955 | 4412 | 3 | 4 | 3 | GalNAc | −84.5 ± 1.6 | −82.6 ± 2.2 | −76.7 ± 3.5 |
| D-1961 | 4412 | 3 | 4 | 3 | GalNAc | −78 ± 12 | −75.7 ± 13.3 | −73 ± 13.1 |
| D-1967 | 4412 | 3 | 4 | 3 | GalNAc | −72.2 ± 24 | −70 ± 25.1 | −64.3 ± 22.4 |
| D-1973 | 4412 | 3 | 4 | 3 | GalNAc | −62.5 ± 7.3 | −56.8 ± 7.3 | −58.2 ± 3 |
| D-1777 | 4412 | 3 | 4 | 3 | GalNAc | −74 ± 17.9 | −72.8 ± 20 | −72 ± 20.7 |
| D-1934 | 5249 | 3 | 4 | 3 | GalNAc | −10.6 ± 25.9 | −4.4 ± 25.7 | −21.6 ± 24.3 |
| D-1940 | 5249 | 3 | 4 | 3 | GalNAc | −41.4 ± 11.5 | −39.9 ± 9.3 | −46.1 ± 10.9 |
| D-1946 | 5249 | 3 | 4 | 3 | GalNAc | −45.9 ± 12.7 | −43.7 ± 13.7 | −50 ± 7.2 |
| D-1952 | 5249 | 3 | 4 | 3 | GalNAc | −72.6 ± 10.9 | −72.3 ± 11.8 | −74.3 ± 12.6 |
| D-1958 | 5249 | 3 | 4 | 3 | GalNAc | −45.9 ± 26.4 | −44.7 ± 27.7 | −56.1 ± 17.1 |
| D-1964 | 5249 | 3 | 4 | 3 | GalNAc | −56.3 ± 19.1 | −56.1 ± 17.1 | −60.4 ± 12.1 |
| D-1970 | 5249 | 3 | 4 | 3 | GalNAc | −79.4 ± 15 | −79.3 ± 14.9 | −80.1 ± 14 |
| D-1769 | 5249 | 3 | 4 | 3 | GalNAc | −67.2 ± 3.2 | −64.9 ± 4.7 | −72.2 ± 3.8 |
| D-1936 | 5274 | 3 | 4 | 3 | GalNAc | −61.7 ± 13 | −60.9 ± 13.1 | −67.3 ± 10.4 |
| D-1942 | 5274 | 3 | 4 | 3 | GalNAc | −51.7 ± 36.3 | −50.8 ± 37.5 | −63.6 ± 19.5 |
| D-1948 | 5274 | 3 | 4 | 3 | GalNAc | −70.5 ± 8.4 | −67.8 ± 11 | −71.7 ± 6.5 |
| D-1954 | 5274 | 3 | 4 | 3 | GalNAc | −71.9 ± 8.4 | −70.6 ± 9.6 | −74 ± 6.1 |
| D-1960 | 5274 | 3 | 4 | 3 | GalNAc | −69.7 ± 15.5 | −67.5 ± 16.3 | −77.9 ± 5.6 |
| D-1966 | 5274 | 3 | 4 | 3 | GalNAc | −76.8 ± 12.6 | −74.1 ± 14 | −76.2 ± 11.3 |
| D-1972 | 5274 | 3 | 4 | 3 | GalNAc | −79.7 ± 8.6 | −77.4 ± 10 | −77 ± 10.5 |
| D-1773 | 5274 | 3 | 4 | 3 | GalNAc | −69.5 ± 13.7 | −66.8 ± 14.1 | −73.9 ± 11.7 |
| D-1709 | 4999 | 3 | 4 | 3 | GalNAc | −86.7 ± 8.9 | −85.2 ± 9.8 | −84 ± 10.7 |
| D-1705 | 5043 | 3 | 4 | 3 | GalNAc | −78.5 ± 2.3 | −77.1 ± 2.2 | −75.3 ± 2.7 |
| D-1597 | 1333 | 3 | 4 | 9-span | GalNAc | −81.3 ± 6.9 | −81.6 ± 7.7 | −81.6 ± 6.7 |
| D-1709 | 4999 | 3 | 4 | 9-span | GalNAc | −93.4 ± 2.5 | −93.7 ± 2 | −94.5 ± 1.9 |
| D-1705 | 5043 | 3 | 4 | 9-span | GalNAc | −94.4 ± 0.4 | −94.2 ± 0.5 | −94.7 ± 0.4 |

TABLE 14
siRNA Efficacy in Liver and Adipose Tissue 4 Weeks Following siRNA Injection

| SIRNA | Trigger | Dose | | AAV | | | Avg. % Change in mRNA ± STD | | |
|---|---|---|---|---|---|---|---|---|---|
| Duplex | Family | (mg/kg) | N | No. | Tissue | Carrier | eGFP-1 | eGFP-2 | BGHpA |
| D-1709 | 4999 | 3 | 4 | 22-span | Liver | GalNAc | −80.8 ± 12 | −81.6 ± 9.7 | −85.7 ± 8.9 |
| D-1887 | 4999 | 20 | 4 | 22-span | Liver | C22 | −85.6 ± 2.1 | −85.9 ± 2.7 | −88.9 ± 1.7 |
| D-1702 | 4999 | 3 | 4 | 22-span | Liver | GalNAc | −83.6 ± 8.3 | −84.3 ± 7.4 | −88.3 ± 5.2 |
| D-1884 | 4999 | 20 | 4 | 22-span | Liver | C22 | −79.5 ± 2.9 | −80.2 ± 3.4 | −85.1 ± 2.2 |
| D-1978 | 4999 | 3 | 4 | 22-span | Liver | GalNAc | −85.9 ± 3.8 | −86.4 ± 3.4 | −89.8 ± 3 |
| D-1879 | 4999 | 3 | 4 | 22-span | Liver | GalNAc | −81.3 ± 3 | −82.6 ± 2.1 | −87.1 ± 0.7 |
| D-2002 | 4999 | 20 | 4 | 22-span | Liver | C22 | −88.5 ± 5.5 | −88.5 ± 5.4 | −92.1 ± 3.2 |
| D-1987 | 4999 | 3 | 4 | 22-span | Liver | GalNAc | −85.9 ± 5.6 | −86.4 ± 5.2 | −91.6 ± 2.2 |
| D-1992 | 4999 | 3 | 4 | 22-span | Liver | GalNAc | −82.7 ± 11.3 | −84 ± 9.9 | −88.1 ± 5.8 |
| D-1997 | 4999 | 3 | 4 | 22-span | Liver | GalNAc | −84.7 ± 7.1 | −84.8 ± 6.2 | −88.1 ± 6.2 |
| D-1705 | 5043 | 3 | 4 | 22-span | Liver | GalNAc | −82.3 ± 8.1 | −82.4 ± 8.1 | −84.2 ± 7 |
| D-1886 | 5043 | 20 | 4 | 22-span | Liver | C22 | −86.2 ± 11.9 | −87.3 ± 10.7 | −87.9 ± 8.7 |
| D-1980 | 5043 | 3 | 4 | 22-span | Liver | GalNAc | −76.9 ± 20.9 | −77.6 ± 19 | −80.4 ± 15.2 |
| D-1984 | 5043 | 3 | 4 | 22-span | Liver | GalNAc | −77.3 ± 8 | −78.5 ± 7.6 | −82.3 ± 6.2 |
| D-2004 | 5043 | 20 | 3 | 22-span | Liver | C22 | −65.8 ± 11.7 | −69.4 ± 10 | −73.7 ± 7.7 |
| D-1989 | 5043 | 3 | 4 | 22-span | Liver | GalNAc | −82.8 ± 9.6 | −83.4 ± 8 | −84.3 ± 7.3 |
| D-1994 | 5043 | 3 | 4 | 22-span | Liver | GalNAc | −79.1 ± 3.3 | −79.5 ± 2.2 | −83 ± 2.2 |
| D-1999 | 5043 | 3 | 4 | 22-span | Liver | GalNAc | −66.2 ± 27.4 | −67.7 ± 25.4 | −69.6 ± 23.7 |
| D-1704 | 5045 | 3 | 4 | 22-span | Liver | GalNAc | −83 ± 10.2 | −83.9 ± 10.1 | −88.6 ± 5.4 |
| D-1885 | 5045 | 20 | 4 | 22-span | Liver | C22 | −89.1 ± 5.5 | −90.3 ± 4.9 | −90.1 ± 7 |
| D-1979 | 5045 | 3 | 4 | 22-span | Liver | GalNAc | −92.3 ± 3.3 | −93 ± 3 | −93.7 ± 2.4 |
| D-1983 | 5045 | 3 | 4 | 22-span | Liver | GalNAc | −71.8 ± 8.3 | −74.6 ± 7.4 | −83.6 ± 4.8 |
| D-2003 | 5045 | 20 | 4 | 22-span | Liver | C22 | −86.7 ± 6.2 | −88.5 ± 5.2 | −90.2 ± 4.8 |
| D-1988 | 5045 | 3 | 4 | 22-span | Liver | GalNAc | −84.4 ± 16.7 | −85 ± 15.7 | −89.6 ± 9.9 |
| D-1993 | 5045 | 3 | 4 | 22-span | Liver | GalNAc | −85 ± 7.4 | −86.1 ± 6.7 | −89.9 ± 4 |
| D-1998 | 5045 | 3 | 4 | 22-span | Liver | GalNAc | −95.3 ± 1.8 | −95.6 ± 1.4 | −96 ± 1.5 |
| D-1623 | 5080 | 3 | 4 | 22-span | Liver | GalNAc | −77.5 ± 13.5 | −78.8 ± 14.7 | −82.5 ± 10.1 |
| D-1862 | 5080 | 20 | 4 | 22-span | Liver | C22 | −79 ± 16 | −81.1 ± 14.7 | −83 ± 11.3 |
| D-1981 | 5080 | 3 | 4 | 22-span | Liver | GalNAc | −82.2 ± 14.2 | −83.2 ± 13.7 | −86.4 ± 10.4 |
| D-1985 | 5080 | 3 | 4 | 22-span | Liver | GalNAc | −90.3 ± 5.4 | −91.3 ± 4.7 | −91.5 ± 4.2 |
| D-2005 | 5080 | 20 | 4 | 22-span | Liver | C22 | −88.9 ± 8 | −89.4 ± 7.3 | −90.3 ± 5.3 |
| D-1990 | 5080 | 3 | 4 | 22-span | Liver | GalNAc | −81.7 ± 8.7 | −84.1 ± 7.3 | −86.1 ± 5.4 |
| D-1995 | 5080 | 3 | 4 | 22-span | Liver | GalNAc | −80.9 ± 8.8 | −84 ± 7.1 | −82.8 ± 7.6 |
| D-2000 | 5080 | 3 | 4 | 22-span | Liver | GalNAc | −78.3 ± 6.4 | −81.5 ± 6.2 | −81.9 ± 4.5 |
| D-1955 | 4412 | 3 | 4 | 22-span | Liver | GalNAc | −74.8 ± 8.4 | −76.7 ± 7.7 | −78.3 ± 9.3 |
| D-1970 | 5249 | 3 | 4 | 22-span | Liver | GalNAc | −66.9 ± 24 | −71.3 ± 21.6 | −74.5 ± 14.7 |
| D-1972 | 5274 | 3 | 4 | 22-span | Liver | GalNAc | −77 ± 10.9 | −78.1 ± 9.6 | −80.5 ± 9.2 |
| D-1774 | 5276 | 3 | 3 | 22-span | Liver | GalNAc | −73.8 ± 10 | −74.7 ± 9.7 | −77.9 ± 10.6 |
| D-1976 | 5276 | 20 | 4 | 22-span | Liver | C22 | −83.6 ± 6.4 | −83.9 ± 6.9 | −87.9 ± 5.6 |
| D-1977 | 5276 | 3 | 4 | 22-span | Liver | GalNAc | −89.5 ± 1.5 | −89.2 ± 1.4 | −90.7 ± 1.1 |
| D-1982 | 5276 | 3 | 4 | 22-span | Liver | GalNAc | −75.7 ± 6.9 | −74.6 ± 7.8 | −80.5 ± 5.3 |
| D-2001 | 5276 | 20 | 4 | 22-span | Liver | C22 | −83.7 ± 4.4 | −83.5 ± 4.9 | −86.7 ± 3 |
| D-1986 | 5276 | 3 | 4 | 22-span | Liver | GalNAc | −69.6 ± 9.2 | −71.4 ± 7.8 | −77.6 ± 7.3 |
| D-1991 | 5276 | 3 | 4 | 22-span | Liver | GalNAc | −83.7 ± 5.2 | −83 ± 5.4 | −86.6 ± 4.1 |
| D-1996 | 5276 | 3 | 4 | 22-span | Liver | GalNAc | −83.3 ± 11.2 | −84.3 ± 11.2 | −85.9 ± 8.9 |
| D-2017 | 1333 | 3 | 4 | 22-span | Liver | GalNAc | −93.1 ± 2 | −92.7 ± 2 | −94.7 ± 1.8 |
| D-1597 | 1333 | 3 | 4 | 22-span | Liver | GalNAc | −87 ± 4.2 | −87.6 ± 3.7 | −89.1 ± 3.5 |
| D-1853 | 1333 | 20 | 4 | 22-span | Liver | C22 | −87.2 ± 3.1 | −86.5 ± 3.1 | −89.4 ± 2.6 |
| D-1667 | 1309 | 3 | 4 | 22-span | Liver | GalNAc | −84.2 ± 10.2 | −84.3 ± 9.6 | −86.5 ± 10.6 |
| D-1849 | 1309 | 20 | 4 | 22-span | Liver | C22 | −91.1 ± 8.5 | −91 ± 7.9 | −92.3 ± 6.2 |
| D-1636 | 2144 | 3 | 4 | 22-span | Liver | GalNAc | −78.2 ± 5.2 | −77.8 ± 5.3 | −77.7 ± 4.4 |
| D-1858 | 2144 | 20 | 4 | 22-span | Liver | C22 | −85.5 ± 6.7 | −85.4 ± 6.1 | −90.7 ± 2.5 |
| D-1650 | 3000 | 3 | 4 | 22-span | Liver | GalNAc | −87.5 ± 6 | −87 ± 5.9 | −89.6 ± 4.4 |
| D-2035 | 3000 | 20 | 4 | 22-span | Liver | C22 | −50.4 ± 29.9 | −48.7 ± 30.8 | −46.6 ± 30.8 |
| D-1557 | 3000 | 3 | 4 | 22-span | Liver | GalNAc | −85.3 ± 14.9 | −85.2 ± 14.5 | −88.3 ± 10.7 |
| D-1861 | 3000 | 20 | 4 | 22-span | Liver | C22 | −92.8 ± 3.2 | −92.2 ± 3.4 | −94.3 ± 2.2 |
| D-1709 | 4999 | 3 | 4 | 22-span | Adipose | GalNAc | 54.7 ± 86.1 | 53.3 ± 88.7 | 59.4 ± 77 |
| D-1887 | 4999 | 20 | 4 | 22-span | Adipose | C22 | −85.4 ± 10.7 | −85.3 ± 10 | −88.2 ± 7.5 |
| D-1702 | 4999 | 3 | 4 | 22-span | Adipose | GalNAc | −38.1 ± 72.9 | −45 ± 62.5 | −34.8 ± 83 |
| D-1884 | 4999 | 20 | 4 | 22-span | Adipose | C22 | −90.2 ± 1.9 | −90.2 ± 1.6 | −92.3 ± 1.9 |
| D-1978 | 4999 | 3 | 4 | 22-span | Adipose | GalNAc | 11.8 ± 77.3 | 6.2 ± 70.4 | 7.8 ± 84.9 |
| D-1879 | 4999 | 3 | 4 | 22-span | Adipose | GalNAc | −14.4 ± 28.1 | −19 ± 28 | −6.3 ± 26.8 |
| D-2002 | 4999 | 20 | 4 | 22-span | Adipose | C22 | −92.9 ± 5.2 | −93.1 ± 5.4 | −95.3 ± 3 |
| D-1987 | 4999 | 3 | 4 | 22-span | Adipose | GalNAc | 73.5 ± 135.8 | 79 ± 140.5 | 68.6 ± 125.8 |
| D-1992 | 4999 | 3 | 4 | 22-span | Adipose | GalNAc | −21.1 ± 86.3 | −17.9 ± 86.4 | −20.7 ± 86 |
| D-1997 | 4999 | 3 | 4 | 22-span | Adipose | GalNAc | −5.5 ± 40.6 | −7.8 ± 43.4 | −7.4 ± 46.8 |
| D-1705 | 5043 | 3 | 4 | 22-span | Adipose | GalNAc | 6.6 ± 93.3 | 2.5 ± 81 | −2.2 ± 89.2 |
| D-1886 | 5043 | 20 | 4 | 22-span | Adipose | C22 | −91.4 ± 5.8 | −90.7 ± 6 | −90.82 ± 7.3 |
| D-1980 | 5043 | 3 | 4 | 22-span | Adipose | GalNAc | −1.1 ± 45.8 | −12.7 ± 40.1 | 1.1 ± 48 |
| D-1984 | 5043 | 3 | 4 | 22-span | Adipose | GalNAc | −30.8 ± 60.8 | −28.8 ± 60.2 | −34.7 ± 51.4 |
| D-2004 | 5043 | 20 | 3 | 22-span | Adipose | C22 | −90.9 ± 7.3 | −91 ± 6 | −92.8 ± 5.6 |
| D-1989 | 5043 | 3 | 4 | 22-span | Adipose | GalNAc | −29.2 ± 64 | −36 ± 54.6 | −18.9 ± 74.2 |
| D-1994 | 5043 | 3 | 4 | 22-span | Adipose | GalNAc | 160.7 ± 277.8 | 170.5 ± 276.8 | 144.6 ± 227.8 |
| D-1999 | 5043 | 3 | 4 | 22-span | Adipose | GalNAc | 43.8 ± 119.1 | 49.5 ± 123.3 | 50.5 ± 127.9 |
| D-1704 | 5045 | 3 | 4 | 22-span | Adipose | GalNAc | −45.7 ± 33.2 | −45.7 ± 35.2 | −46 ± 29.9 |
| D-1885 | 5045 | 20 | 4 | 22-span | Adipose | C22 | −97 ± 2.2 | −97 ± 1.9 | −96.7 ± 3 |
| D-1979 | 5045 | 3 | 4 | 22-span | Adipose | GalNAc | −60.8 ± 31.4 | −58.4 ± 37 | −65.6 ± 25.6 |
| D-1983 | 5045 | 3 | 4 | 22-span | Adipose | GalNAc | −31.4 ± 68.4 | −24.2 ± 78.3 | −34.1 ± 65.3 |
| D-2003 | 5045 | 20 | 4 | 22-span | Adipose | C22 | −92.5 ± 5.1 | −92.8 ± 4.5 | −94.6 ± 3.6 |
| D-1988 | 5045 | 3 | 4 | 22-span | Adipose | GalNAc | 125 ± 249.1 | 108.8 ± 235.9 | 162.6 ± 294.1 |
| D-1993 | 5045 | 3 | 4 | 22-span | Adipose | GalNAc | −27 ± 97 | −31.1 ± 85.3 | −24.5 ± 101.3 |
| D-1998 | 5045 | 3 | 4 | 22-span | Adipose | GalNAc | 17.7 ± 133.4 | 6.3 ± 116.3 | 14.3 ± 134.1 |
| D-1623 | 5080 | 3 | 4 | 22-span | Adipose | GalNAc | −25.3 ± 71.6 | −29.6 ± 65.9 | −23.2 ± 76.9 |
| D-1862 | 5080 | 20 | 4 | 22-span | Adipose | C22 | −92.1 ± 4.3 | −91.8 ± 4.8 | −94.6 ± 3.7 |
| D-1981 | 5080 | 3 | 4 | 22-span | Adipose | GalNAc | −1.8 ± 67.6 | −8.1 ± 63.5 | 0.5 ± 72.2 |
| D-1985 | 5080 | 3 | 4 | 22-span | Adipose | GalNAc | −21.9 ± 83 | −25.4 ± 79 | −24.5 ± 86.3 |
| D-2005 | 5080 | 20 | 4 | 22-span | Adipose | C22 | −85.9 ± 9.7 | −86.8 ± 8.5 | −92.3 ± 5.5 |
| D-1990 | 5080 | 3 | 4 | 22-span | Adipose | GalNAc | −4.1 ± 104 | −5.1 ± 100.6 | −2 ± 107.4 |
| D-1995 | 5080 | 3 | 4 | 22-span | Adipose | GalNAc | −23.7 ± 41.3 | −29.9 ± 39.2 | −28.1 ± 41.4 |
| D-2000 | 5080 | 3 | 4 | 22-span | Adipose | GalNAc | −71.9 ± 15.2 | −73.3 ± 14.4 | −69.7 ± 18.6 |
| D-1955 | 4412 | 3 | 4 | 22-span | Adipose | GalNAc | −36.7 ± 62.3 | −36.3 ± 61.6 | −34.6 ± 68.6 |
| D-1970 | 5249 | 3 | 4 | 22-span | Adipose | GalNAc | −51.1 ± 48.8 | −48.6 ± 52.8 | −54.4 ± 47.3 |
| D-1972 | 5274 | 3 | 4 | 22-span | Adipose | GalNAc | −37 ± 22.6 | −28.7 ± 27.9 | −37.3 ± 21 |
| D-1774 | 5276 | 3 | 3 | 22-span | Adipose | GalNAc | 171 ± 226.8 | 165.7 ± 214.9 | 168.2 ± 242.3 |
| D-1976 | 5276 | 20 | 4 | 22-span | Adipose | C22 | −82.7 ± 15.8 | −82.9 ± 15 | −87.8 ± 11.5 |
| D-1977 | 5276 | 3 | 4 | 22-span | Adipose | GalNAc | −21.3 ± 82.3 | −14.2 ± 87.6 | −23.4 ± 78.2 |
| D-1982 | 5276 | 3 | 4 | 22-span | Adipose | GalNAc | 164.9 ± 233.4 | 167.4 ± 228.3 | 157.3 ± 227.8 |
| D-2001 | 5276 | 20 | 4 | 22-span | Adipose | C22 | −92.3 ± 2.3 | −91.7 ± 2.6 | −95.2 ± 1.4 |
| D-1986 | 5276 | 3 | 4 | 22-span | Adipose | GalNAc | 80.1 ± 94 | 67.7 ± 71.1 | 77.4 ± 85.6 |
| D-1991 | 5276 | 3 | 4 | 22-span | Adipose | GalNAc | −47.7 ± 10.6 | −47.9 ± 11.6 | −47.2 ± 11.1 |
| D-1996 | 5276 | 3 | 4 | 22-span | Adipose | GalNAc | 251.3 ± 448.9 | 228.4 ± 404.2 | 294.1 ± 491.1 |
| D-2017 | 1333 | 3 | 4 | 22-span | Adipose | GalNAc | 51.1 ± 20.6 | −49.3 ± 23 | −48.6 ± 24.1 |
| D-1597 | 1333 | 3 | 4 | 22-span | Adipose | GalNAc | 58.2 ± 158.7 | 46.4 ± 139.6 | 44.4 ± 138.8 |
| D-1853 | 1333 | 20 | 4 | 22-span | Adipose | C22 | −50.4 ± 2.9 | −51.3 ± 2 | −65.9 ± 7.5 |
| D-1667 | 1309 | 3 | 4 | 22-span | Adipose | GalNAc | 154.6 ± 218.9 | 143.5 ± 199.5 | 163 ± 206.2 |
| D-1849 | 1309 | 20 | 4 | 22-span | Adipose | C22 | −71.6 ± 27.5 | −70 ± 30 | −79.5 ± 23.8 |
| D-1636 | 2144 | 3 | 4 | 22-span | Adipose | GalNAc | −69.5 ± 25.7 | −69.3 ± 23.4 | −77.5 ± 19.5 |
| D-1858 | 2144 | 20 | 4 | 22-span | Adipose | C22 | −66.2 ± 18.2 | −63.6 ± 22.3 | −81.7 ± 10.5 |
| D-1650 | 3000 | 3 | 4 | 22-span | Adipose | GalNAc | 121 ± 235.1 | 104.5 ± 202.1 | 179.8 ± 319.6 |
| D-2035 | 3000 | 20 | 4 | 22-span | Adipose | C22 | −65 ± 28.1 | −62.1 ± 29.7 | −66.4 ± 31.9 |
| D-1557 | 3000 | 3 | 4 | 22-span | Adipose | GalNAc | 67.1 ± 166.8 | 93.7 ± 184 | 74.4 ± 166.2 |
| D-1861 | 3000 | 20 | 4 | 22-span | Adipose | C22 | −96 ± 5.4 | −95.3 ± 6.4 | −97 ± 3.6 |

TABLE 15
siRNA Efficacy in Liver 4 Weeks Following siRNA Injection

| SIRNA | Trigger | Dose | | | | Avg. % Change in mRNA ± STD | | |
|---|---|---|---|---|---|---|---|---|
| Duplex | Family | (mg/kg) | N | AAV No. | Carrier | eGFP-1 | eGFP-2 | BGHpA |
| D-1614 | 4999 | 1 | 4 | 3 | GalNAc | −40.7 ± 17.9 | −39.6 ± 15.7 | −41.1 ± 19.3 |
| D-1611 | 5043 | 1 | 4 | 3 | GalNAc | −31.7 ± 28 | −32.7 ± 26 | −48.1 ± 20.5 |
| D-1742 | 4484 | 1 | 4 | 3 | GalNAc | −3.9 ± 22.4 | −0.9 ± 17.6 | −23.5 ± 16.7 |
| D-1743 | 4485 | 1 | 4 | 3 | GalNAc | −35.7 ± 39.2 | −33.8 ± 43.6 | −45.2 ± 26.3 |
| D-1744 | 4717 | 1 | 4 | 3 | GalNAc | −44.9 ± 30.1 | −49.8 ± 23.9 | −45.9 ± 12.8 |
| D-1745 | 4799 | 1 | 4 | 3 | GalNAc | −15 ± 25.8 | −21.9 ± 24 | −4.6 ± 31 |
| D-1746 | 4801 | 1 | 4 | 3 | GalNAc | −29.3 ± 49.2 | −32.5 ± 46.5 | −31.7 ± 38.3 |
| D-1747 | 4802 | 1 | 4 | 3 | GalNAc | 14.7 ± 53.5 | 16 ± 55.1 | 14.9 ± 46 |
| D-1748 | 4806 | 1 | 4 | 3 | GalNAc | 33.3 ± 51.8 | 21.9 ± 46.2 | −11.2 ± 21.5 |
| D-1749 | 4950 | 1 | 4 | 3 | GalNAc | −26.3 ± 7.9 | −22.5 ± 7.1 | −32.4 ± 10.3 |
| D-1750 | 4951 | 1 | 4 | 3 | GalNAc | −15.7 ± 33.3 | −9.4 ± 36.4 | −33.6 ± 22.4 |
| D-1751 | 4953 | 1 | 4 | 3 | GalNAc | 7.4 ± 34.9 | 12.5 ± 35.5 | −15.3 ± 33.1 |
| D-1752 | 4954 | 1 | 4 | 3 | GalNAc | −5.1 ± 35.9 | −2.1 ± 35.1 | −25.5 ± 23.3 |
| D-1753 | 4955 | 1 | 4 | 3 | GalNAc | 6.2 ± 38.7 | 13.5 ± 38.1 | 14.8 ± 55.2 |
| D-1754 | 4958 | 1 | 4 | 3 | GalNAc | −21 ± 18.5 | −19.8 ± 13.2 | −35.3 ± 4.6 |
| D-1755 | 4965 | 1 | 4 | 3 | GalNAc | 12.9 ± 31.8 | 7.1 ± 27.4 | 7.3 ± 24.2 |
| D-1756 | 4970 | 1 | 4 | 3 | GalNAc | 23.6 ± 25.4 | 25.9 ± 26 | 17.3 ± 23.6 |
| D-1757 | 4996 | 1 | 4 | 3 | GalNAc | −15.5 ± 17.8 | −10.8 ± 22 | −27.5 ± 9.6 |
| D-1758 | 4997 | 1 | 4 | 3 | GalNAc | 6.9 ± 13.4 | 8.3 ± 13.3 | −24.1 ± 13.7 |
| D-1759 | 5008 | 1 | 4 | 3 | GalNAc | 70.4 ± 77 | 79.3 ± 88.9 | 14.4 ± 36.1 |
| D-1760 | 5056 | 1 | 4 | 3 | GalNAc | −5.1 ± 19.6 | −2 ± 18.9 | −42.6 ± 7 |
| D-1761 | 5080 | 1 | 4 | 3 | GalNAc | 9.2 ± 33.4 | 15.1 ± 33 | −37.6 ± 4.3 |
| D-1762 | 5114 | 1 | 4 | 3 | GalNAc | −27.6 ± 26.5 | −21.7 ± 27 | −47.8 ± 13.6 |
| D-1763 | 5115 | 1 | 4 | 3 | GalNAc | 24.8 ± 64.5 | 25.4 ± 60.1 | −2.1 ± 28.1 |
| D-1764 | 5154 | 1 | 4 | 3 | GalNAc | 8.7 ± 50.5 | 15.7 ± 57.8 | −4.1 ± 32.8 |
| D-1765 | 5155 | 1 | 4 | 3 | GalNAc | 28.9 ± 64.5 | 40.4 ± 72.9 | 3.6 ± 35.5 |
| D-1766 | 5195 | 1 | 4 | 3 | GalNAc | 28.3 ± 40.2 | 28.8 ± 32.9 | 52.2 ± 56.6 |
| D-1767 | 5200 | 1 | 4 | 3 | GalNAc | 77.3 ± 52.2 | 82.7 ± 68.3 | 46.4 ± 48.2 |
| D-1614 | 4999 | 1 | 4 | 3 | GalNAc | −83.8 ± 2.8 | −82.2 ± 2.6 | −73.4 ± 3.8 |
| D-1611 | 5043 | 1 | 4 | 3 | GalNAc | −50.5 ± 5.6 | −50 ± 9 | −50 ± 3.7 |
| D-1768 | 5247 | 1 | 4 | 3 | GalNAc | −55.7 ± 3.3 | −53.3 ± 4.1 | −49.9 ± 4.3 |
| D-1769 | 5249 | 1 | 4 | 3 | GalNAc | −56.7 ± 10 | −53.6 ± 9.5 | −52.2 ± 2.4 |
| D-1770 | 5251 | 1 | 4 | 3 | GalNAc | −33.4 ± 10 | −31.6 ± 10.2 | −38.9 ± 8.5 |
| D-1771 | 5254 | 1 | 4 | 3 | GalNAc | −32.5 ± 16.7 | −28.3 ± 20.6 | −30.7 ± 8.4 |
| D-1772 | 5259 | 1 | 4 | 3 | GalNAc | −42.9 ± 22.8 | −39.9 ± 23.9 | −44.1 ± 18.5 |
| D-1773 | 5274 | 1 | 4 | 3 | GalNAc | −52.4 ± 16.3 | −46.6 ± 21.8 | −62.1 ± 8.1 |
| D-1774 | 5276 | 1 | 4 | 3 | GalNAc | −51.9 ± 23.5 | −50.2 ± 23.8 | −44 ± 37.8 |
| D-1775 | 5344 | 1 | 4 | 3 | GalNAc | 1.8 ± 46.5 | 8.3 ± 63.6 | 8.3 ± 38.4 |
| D-1776 | 5402 | 1 | 4 | 3 | GalNAc | −33.2 ± 37 | −21.4 ± 44.9 | −26.9 ± 44.4 |
| D-1777 | 4412 | 1 | 4 | 3 | GalNAc | −51.3 ± 10.8 | −46.8 ± 9.3 | −51 ± 7.5 |
| D-1778 | 4777 | 1 | 4 | 3 | GalNAc | −28.5 ± 43.7 | −17.5 ± 55.4 | −33.7 ± 35.1 |
| D-1779 | 4780 | 1 | 4 | 3 | GalNAc | −19 ± 26.9 | −4.3 ± 26.2 | −16 ± 21.4 |
| D-1780 | 4819 | 1 | 4 | 3 | GalNAc | −18.8 ± 39.4 | −4.3 ± 46.1 | −1.9 ± 45.2 |
| D-1781 | 4834 | 1 | 4 | 3 | GalNAc | −63.4 ± 8.6 | −58.4 ± 12.7 | −60 ± 12.2 |
| D-1782 | 4931 | 1 | 4 | 3 | GalNAc | 41.3 ± 12.2 | −34.9 ± 12.7 | −23.6 ± 10.1 |
| D-1783 | 4932 | 1 | 4 | 3 | GalNAc | −59.1 ± 10.8 | −57.2 ± 11.4 | −52.7 ± 8.6 |
| D-1784 | 4933 | 1 | 4 | 3 | GalNAc | −33.6 ± 7.4 | −31.2 ± 9.6 | −17.7 ± 9.5 |
| D-1785 | 4935 | 1 | 4 | 3 | GalNAc | −27 ± 31.3 | −14.9 ± 37.2 | −22.9 ± 27.1 |
| D-1786 | 4939 | 1 | 4 | 3 | GalNAc | −34.6 ± 17.4 | −34.6 ± 17.1 | −32.2 ± 23.8 |
| D-1787 | 4940 | 1 | 4 | 3 | GalNAc | 0.6 ± 31.7 | −12 ± 20.3 | −5.1 ± 13.9 |
| D-1788 | 4989 | 1 | 4 | 3 | GalNAc | −42.4 ± 25.6 | −38.8 ± 23.8 | −30.5 ± 18.8 |
| D-1789 | 4991 | 1 | 4 | 3 | GalNAc | −37.1 ± 8.7 | −30.7 ± 8.1 | −17.2 ± 6.8 |
| D-1790 | 5201 | 1 | 4 | 3 | GalNAc | −22.6 ± 50.6 | −17.1 ± 54.8 | −11.9 ± 52.9 |
| D-1791 | 5203 | 1 | 4 | 3 | GalNAc | −19 ± 34.6 | −17.9 ± 35.4 | −2.2 ± 51.2 |
| D-1792 | 5204 | 1 | 4 | 3 | GalNAc | −55.4 ± 6.5 | −49.7 ± 6.7 | −31 ± 12.8 |
| D-1793 | 5207 | 1 | 4 | 3 | GalNAc | −46 ± 13.6 | −42.6 ± 18.7 | −26.8 ± 22.9 |
| D-1597 | 1333 | 1 | 4 | 1 | GalNAc | −7.1 ± 14.9 | −3.7 ± 15.6 | −10.5 ± 13.8 |
| D-1544 | 2144 | 1 | 4 | 1 | GalNAc | −26.1 ± 20.1 | −22.6 ± 14 | −32.8 ± 16.4 |
| D-1794 | 1305 | 1 | 4 | 1 | GalNAc | −9.6 ± 21.6 | −2.6 ± 18.8 | −19.9 ± 17.5 |
| D-1795 | 1306 | 1 | 4 | 1 | GalNAc | 2.7 ± 27.1 | 7.9 ± 32.2 | 4.2 ± 26.5 |
| D-1796 | 1308 | 1 | 4 | 1 | GalNAc | −8.8 ± 26.4 | −5.8 ± 23.5 | −20.8 ± 18.6 |
| D-1797 | 1472 | 1 | 4 | 1 | GalNAc | 0.6 ± 49.8 | 0.3 ± 54.3 | −20.3 ± 38.7 |
| D-1798 | 1500 | 1 | 4 | 1 | GalNAc | −4.6 ± 8.9 | −3.9 ± 9.5 | −19.3 ± 18 |
| D-1809 | 2296 | 1 | 4 | 1 | GalNAc | 12.4 ± 65.3 | 15 ± 64.7 | 21.4 ± 78.9 |
| D-1810 | 2343 | 1 | 4 | 1 | GalNAc | −30 ± 20.2 | −28.8 ± 20.4 | −38.3 ± 13.1 |
| D-1811 | 2355 | 1 | 4 | 1 | GalNAc | −20.1 ± 39.6 | −20.6 ± 32.7 | −18.9 ± 30.3 |
| D-1812 | 2417 | 1 | 4 | 1 | GalNAc | −42.3 ± 12.1 | −38.8 ± 12.2 | −45.6 ± 4.9 |
| D-1813 | 2432 | 1 | 4 | 1 | GalNAc | −28.6 ± 22.1 | −22.1 ± 27.3 | −36.7 ± 14.5 |
| D-1814 | 2688 | 1 | 4 | 1 | GalNAc | 21.5 ± 13 | 23.6 ± 14.6 | −6.8 ± 10.2 |
| D-1815 | 2690 | 1 | 4 | 1 | GalNAc | −21.3 ± 19.1 | −18.3 ± 17.1 | −34.5 ± 9.8 |
| D-1816 | 2886 | 1 | 4 | 1 | GalNAc | −23.6 ± 42.2 | −18.2 ± 45.8 | −49.4 ± 24.2 |
| D-1817 | 1326 | 1 | 4 | 1 | GalNAc | −14.2 ± 21 | −13.1 ± 16 | −36.1 ± 9.9 |
| D-1818 | 1331 | 1 | 4 | 1 | GalNAc | 11.5 ± 72 | 12.7 ± 62.6 | −21.3 ± 35.1 |
| D-1819 | 1407 | 1 | 4 | 1 | GalNAc | −20.5 ± 12.3 | −17.4 ± 20.2 | −35.4 ± 5.6 |
| D-1597 | 1333 | 1 | 4 | 1 | GalNAc | −29.9 ± 43.6 | −36.7 ± 36 | −40.4 ± 31.5 |
| D-1544 | 2144 | 1 | 4 | 1 | GalNAc | 16.9 ± 24.5 | 10.7 ± 23.7 | 1.5 ± 30 |
| D-1820 | 1514 | 1 | 4 | 1 | GalNAc | −26 ± 41.7 | −23.6 ± 41.8 | −26.4 ± 37.4 |
| D-1821 | 1564 | 1 | 4 | 1 | GalNAc | 16.7 ± 67 | 12.9 ± 68.8 | 105.3 ± 51.2 |
| D-1822 | 1611 | 1 | 4 | 1 | GalNAc | 58.7 ± 72 | 57.7 ± 80 | 45.4 ± 67.1 |
| D-1823 | 1615 | 1 | 4 | 1 | GalNAc | 27.2 ± 21.2 | 38.5 ± 23.9 | 24.7 ± 30.4 |
| D-1824 | 1616 | 1 | 4 | 1 | GalNAc | −17.8 ± 56.8 | −13.7 ± 59.5 | −12.9 ± 59.4 |
| D-1825 | 1618 | 1 | 4 | 1 | GalNAc | −20.6 ± 35.1 | −21.3 ± 35 | −31.1 ± 22 |
| D-1826 | 1693 | 1 | 4 | 1 | GalNAc | −28.1 ± 32.7 | −13.8 ± 32.7 | −34.2 ± 30.4 |
| D-1827 | 1697 | 1 | 4 | 1 | GalNAc | 0.8 ± 18.9 | −1.8 ± 19.2 | 4.9 ± 41.3 |
| D-1828 | 1700 | 1 | 4 | 1 | GalNAc | 32.6 ± 24.6 | 33 ± 14 | 15.6 ± 19.4 |
| D-1829 | 1701 | 1 | 4 | 1 | GalNAc | 17.8 ± 50.2 | 11.2 ± 46.5 | 2.7 ± 40.7 |
| D-1830 | 1703 | 1 | 4 | 1 | GalNAc | 51.5 ± 39 | 44.7 ± 43.9 | 32.3 ± 35.8 |
| D-1831 | 1704 | 1 | 4 | 1 | GalNAc | 9.4 ± 36.6 | 9.7 ± 36.7 | −5.9 ± 23.2 |
| D-1832 | 1716 | 1 | 4 | 1 | GalNAc | 21.8 ± 29.4 | 29.7 ± 25.6 | 25.8 ± 28.6 |
| D-1833 | 1717 | 1 | 4 | 1 | GalNAc | 24.7 ± 45.7 | 33.3 ± 42.4 | 27.2 ± 34.9 |
| D-1834 | 1832 | 1 | 4 | 1 | GalNAc | 91.8 ± 94.3 | 125.8 ± 122.3 | 80.5 ± 91.5 |
| D-1835 | 1833 | 1 | 4 | 1 | GalNAc | 72.7 ± 75.1 | 98.8 ± 91.9 | 72.8 ± 71.2 |
| D-1836 | 1834 | 1 | 4 | 1 | GalNAc | 4 ± 25.5 | 3.4 ± 27.5 | 7.3 ± 26.1 |
| D-1837 | 1856 | 1 | 4 | 1 | GalNAc | −8.2 ± 8.8 | −10.2 ± 9.3 | −16.2 ± 15.9 |
| D-1838 | 1900 | 1 | 4 | 1 | GalNAc | 35.2 ± 35.2 | 42.4 ± 32.3 | 13.6 ± 28.3 |
| D-1839 | 2275 | 1 | 4 | 1 | GalNAc | 54.8 ± 62.1 | 57.1 ± 67.4 | 9.3 ± 30.7 |
| D-1840 | 2437 | 1 | 4 | 1 | GalNAc | 80 ± 18.3 | 79.2 ± 26.8 | 79.4 ± 22.8 |
| D-1841 | 2439 | 1 | 4 | 1 | GalNAc | 49.2 ± 23.8 | 43.4 ± 12.9 | 42.3 ± 19.9 |
| D-1842 | 2534 | 1 | 4 | 1 | GalNAc | 24.1 ± 22.7 | 12.5 ± 17.4 | 16.7 ± 10.3 |
| D-1843 | 2693 | 1 | 4 | 1 | GalNAc | 87.7 ± 40.7 | 83.7 ± 39.7 | 62.3 ± 32.7 |
| D-1844 | 2719 | 1 | 4 | 1 | GalNAc | 24.4 ± 44.4 | 26.8 ± 38.5 | 19.9 ± 22.8 |
| D-1845 | 2726 | 1 | 4 | 1 | GalNAc | 26.8 ± 46.2 | 29.3 ± 49.8 | 25.5 ± 43.9 |

TABLE 16
siRNA Efficacy in Liver 4 Weeks Following siRNA Injection

| SIRNA | Trigger | Dose | | | | Avg. % Change in mRNA ± STD | | |
|---|---|---|---|---|---|---|---|---|
| Duplex | Family | (mg/kg) | N | AAV No. | Carrier | eGFP-1 | eGFP-2 | BGHpA |
| D-1744 | 4717 | 3 | 4 | 3 | GalNAc | −62.6 ± 19.9 | −61.8 ± 21.1 | −63 ± 14 |
| D-1896 | 4717 | 3 | 4 | 3 | GalNAc | −81.8 ± 6.7 | −81.3 ± 7.2 | −75.2 ± 9.1 |
| D-1902 | 4717 | 3 | 4 | 3 | GalNAc | −59.6 ± 14.4 | −59.4 ± 15.3 | −62.5 ± 8.5 |
| D-1908 | 4717 | 3 | 4 | 3 | GalNAc | −67.3 ± 9.2 | −65.2 ± 11.5 | −60.4 ± 15 |
| D-1781 | 4834 | 3 | 4 | 3 | GalNAc | −64.9 ± 8.5 | −65 ± 6.9 | −60.9 ± 3.9 |
| D-1894 | 4834 | 3 | 4 | 3 | GalNAc | −66.9 ± 10.7 | −65.6 ± 10.5 | −61 ± 8 |
| D-1900 | 4834 | 3 | 4 | 3 | GalNAc | −54.2 ± 25.6 | −56.4 ± 26 | −57 ± 13.9 |
| D-1906 | 4834 | 3 | 4 | 3 | GalNAc | −64.2 ± 10.8 | −62.9 ± 11 | −64.9 ± 7.8 |
| D-1783 | 4932 | 3 | 4 | 3 | GalNAc | −79.1 ± 8.3 | −79.3 ± 7.9 | −74.5 ± 4.7 |
| D-1895 | 4932 | 3 | 4 | 3 | GalNAc | −75.3 ± 17.4 | −74.1 ± 17.5 | −64.9 ± 13.2 |
| D-1901 | 4932 | 3 | 4 | 3 | GalNAc | −50.8 ± 7.8 | −47.6 ± 9.7 | −57.1 ± 6.7 |
| D-1907 | 4932 | 3 | 4 | 3 | GalNAc | −74.6 ± 11.3 | −73.9 ± 12.4 | −70.6 ± 15 |
| D-1614 | 4999 | 3 | 4 | 3 | GalNAc | −72.2 ± 10.1 | −71.9 ± 10.2 | −63.3 ± 10.6 |
| D-1611 | 5043 | 3 | 4 | 3 | GalNAc | −66.7 ± 24.4 | −67.8 ± 22.8 | −70.6 ± 17.9 |
| D-1792 | 5204 | 3 | 4 | 3 | GalNAc | −55.6 ± 9.1 | −52.9 ± 7.6 | −62.9 ± 6.5 |
| D-1892 | 5204 | 3 | 4 | 3 | GalNAc | −54.2 ± 12.8 | −53.1 ± 14.4 | −56.1 ± 11.1 |
| D-1898 | 5204 | 3 | 4 | 3 | GalNAc | −69.1 ± 3.8 | −68.5 ± 3.2 | −66.8 ± 2.3 |
| D-1904 | 5204 | 3 | 4 | 3 | GalNAc | −39.5 ± 13 | −39.3 ± 14.2 | −49.1 ± 11 |
| D-1768 | 5247 | 3 | 4 | 3 | GalNAc | −67.2 ± 7.6 | −69.4 ± 7 | −69.4 ± 8.7 |
| D-1891 | 5247 | 3 | 4 | 3 | GalNAc | −37.2 ± 16 | −39.3 ± 15.8 | −57.1 ± 11.9 |
| D-1897 | 5247 | 3 | 4 | 3 | GalNAc | −61.7 ± 9.1 | −60.4 ± 9.6 | −67.2 ± 6.4 |
| D-1903 | 5247 | 3 | 4 | 3 | GalNAc | −39.3 ± 28.3 | −38.4 ± 30.2 | −56.1 ± 16.5 |
| D-1774 | 5276 | 3 | 4 | 3 | GalNAc | −70 ± 20.2 | −70.5 ± 18.8 | −68.2 ± 21.8 |
| D-1893 | 5276 | 3 | 4 | 3 | GalNAc | −59.4 ± 11.7 | −56.8 ± 12.6 | −61.5 ± 7.3 |
| D-1899 | 5276 | 3 | 4 | 3 | GalNAc | −73.8 ± 6.3 | −72.9 ± 7.9 | −72.4 ± 5.3 |
| D-1905 | 5276 | 3 | 4 | 3 | GalNAc | −59.7 ± 8.2 | −59.1 ± 8.2 | −61.8 ± 3.6 |
| D-1914 | 4717 | 3 | 4 | 3 | GalNAc | −55.9 ± 5.1 | −51 ± 6 | −64.9 ± 12.9 |
| D-1920 | 4717 | 3 | 4 | 3 | GalNAc | −61.8 ± 10.6 | −58.2 ± 13 | −59.2 ± 7.6 |
| D-1926 | 4717 | 3 | 4 | 3 | GalNAc | −40.6 ± 25 | −39.3 ± 19.9 | −52.3 ± 11.1 |
| D-1932 | 4717 | 3 | 4 | 3 | GalNAc | −69.5 ± 8.3 | −68.7 ± 6.7 | −67.6 ± 7.4 |
| D-1912 | 4834 | 3 | 4 | 3 | GalNAc | −25.9 ± 30.2 | −7.6 ± 46.6 | −43.6 ± 20.4 |
| D-1918 | 4834 | 3 | 4 | 3 | GalNAc | −71.9 ± 40.5 | −71.3 ± 41 | −69.3 ± 41.3 |
| D-1924 | 4834 | 3 | 4 | 3 | GalNAc | −27.1 ± 27 | −29.6 ± 21.3 | −36.2 ± 18.8 |
| D-1930 | 4834 | 3 | 4 | 3 | GalNAc | −62.5 ± 17.3 | −64.9 ± 17.4 | −64.3 ± 15.7 |
| D-1913 | 4932 | 3 | 4 | 3 | GalNAc | −55.9 ± 12.3 | −47.5 ± 11.4 | −53.1 ± 12.5 |
| D-1919 | 4932 | 3 | 4 | 3 | GalNAc | −38 ± 37.3 | −34.7 ± 44.3 | −55.1 ± 22.1 |
| D-1925 | 4932 | 3 | 4 | 3 | GalNAc | −56.9 ± 9.8 | −51.5 ± 11.8 | −58.3 ± 8.8 |
| D-1931 | 4932 | 3 | 4 | 3 | GalNAc | −62.1 ± 14.1 | −63.2 ± 10.2 | −58.1 ± 14.8 |
| D-1614 | 4999 | 3 | 4 | 3 | GalNAc | −76.1 ± 7 | −78.2 ± 5.6 | −73.3 ± 9.8 |
| D-1611 | 5043 | 3 | 4 | 3 | GalNAc | −46.6 ± 8 | −47.3 ± 7.3 | −52.1 ± 11.5 |
| D-1910 | 5204 | 3 | 4 | 3 | GalNAc | −30.7 ± 40.6 | −33.5 ± 39.2 | −41.1 ± 35.3 |
| D-1916 | 5204 | 3 | 4 | 3 | GalNAc | −59.5 ± 8.3 | −59.6 ± 10.9 | −59.3 ± 4.4 |
| D-1922 | 5204 | 3 | 4 | 3 | GalNAc | −16.2 ± 25.6 | −20 ± 22.8 | −24.5 ± 22.7 |
| D-1928 | 5204 | 3 | 4 | 3 | GalNAc | −61.8 ± 6.1 | −58.5 ± 8 | −56.4 ± 15.8 |
| D-1909 | 5247 | 3 | 4 | 3 | GalNAc | −59 ± 20.7 | −60.6 ± 16.4 | −65.7 ± 12.5 |
| D-1915 | 5247 | 3 | 4 | 3 | GalNAc | −52.8 ± 20.8 | −37.6 ± 29.6 | −66 ± 11.9 |
| D-1921 | 5247 | 3 | 4 | 3 | GalNAc | −54.4 ± 13.4 | −48.2 ± 19.7 | −66 ± 12.1 |
| D-1927 | 5247 | 3 | 4 | 3 | GalNAc | −47.4 ± 21.1 | −35.6 ± 31.6 | −57.9 ± 17.4 |
| D-1911 | 5276 | 3 | 4 | 3 | GalNAc | −49.6 ± 22.2 | −47.1 ± 24.8 | −60.6 ± 18.2 |
| D-1917 | 5276 | 3 | 4 | 3 | GalNAc | −79.6 ± 17.6 | −77.6 ± 19.8 | −76.4 ± 17.7 |
| D-1923 | 5276 | 3 | 4 | 3 | GalNAc | −63.8 ± 17.3 | −61.4 ± 19.7 | −59.5 ± 21.4 |
| D-1929 | 5276 | 3 | 4 | 3 | GalNAc | −69 ± 10.5 | −68.8 ± 10 | −59 ± 11.2 |

TABLE 17
siRNA Efficacy in Liver 4 Weeks Following siRNA Injection

| SIRNA | Trigger | Dose | | AAV | | Avg. % Change in mRNA ± STD | | |
|---|---|---|---|---|---|---|---|---|
| Duplex | Family | (mg/kg) | N | No. | Carrier | eGFP-1 | eGFP-2 | BGHpA |
| D-1709 | 4999 | 3 | 4 | 22span | GalNAc | −83.2 ± 8.6 | −82.9 ± 9.3 | −83.7 ± 7.5 |
| D-2008 | 4999 | 3 | 4 | 22span | GalNAc | −62.7 ± 8.7 | −65.6 ± 11.3 | −76.2 ± 7.4 |
| D-2017 | 4999 | 3 | 4 | 22span | GalNAc | −66.4 ± 15.5 | −66.4 ± 16.1 | −72.6 ± 11.5 |
| D-2049 | 4999 | 3 | 4 | 22span | GalNAc | −78.6 ± 11.1 | −79.7 ± 10.1 | −85.5 ± 5.7 |
| D-2054 | 4999 | 3 | 4 | 22span | GalNAc | −82.6 ± 6.2 | −82.4 ± 5.9 | −87.3 ± 3.8 |
| D-1704 | 5045 | 3 | 4 | 22span | GalNAc | −81.1 ± 8.4 | −81.8 ± 6.9 | −83.3 ± 6 |
| D-2012 | 5045 | 3 | 4 | 22span | GalNAc | −91.6 ± 1.1 | −91.3 ± 0.8 | −90.4 ± 1.2 |
| D-2021 | 5045 | 3 | 4 | 22span | GalNAc | −84.5 ± 6.7 | −85.3 ± 5.2 | −84.8 ± 6.3 |
| D-2043 | 5045 | 3 | 4 | 22span | GalNAc | −74 ± 12.9 | −74.7 ± 11.1 | −79.2 ± 8.6 |
| D-2047 | 5045 | 3 | 4 | 22span | GalNAc | −80.1 ± 13.4 | −81 ± 11.1 | −81.6 ± 11.4 |
| D-2052 | 5045 | 3 | 4 | 22span | GalNAc | −84.2 ± 5.9 | −84.1 ± 6.5 | −83.3 ± 4.9 |
| D-1623 | 5080 | 3 | 4 | 22span | GalNAc | −59.6 ± 11.3 | −62.9 ± 11.1 | −62.9 ± 11 |
| D-2014 | 5080 | 3 | 4 | 22span | GalNAc | −89.1 ± 10.6 | −88.8 ± 9.1 | −88.5 ± 9.8 |
| D-2023 | 5080 | 3 | 4 | 22span | GalNAc | −89.1 ± 6.5 | −88.2 ± 6.2 | −87.6 ± 5.3 |
| D-2036 | 4995 | 3 | 4 | 22span | GalNAc | −59.3 ± 40.7 | −60.4 ± 39.2 | −66 ± 29.9 |
| D-2037 | 4996 | 3 | 4 | 22span | GalNAc | −42.8 ± 23.2 | −48.5 ± 16.9 | −42.5 ± 20.2 |
| D-2038 | 4997 | 3 | 4 | 22span | GalNAc | 76.6 ± 62.9 | 105.4 ± 74.5 | 88.1 ± 60.4 |
| D-2039 | 4998 | 3 | 4 | 22span | GalNAc | −43.5 ± 27.1 | −43.6 ± 30.2 | −56.6 ± 19 |
| D-2040 | 5042 | 3 | 4 | 22span | GalNAc | −83.5 ± 10.5 | −83.8 ± 9.5 | −84.3 ± 7.2 |
| D-1705 | 5043 | 3 | 4 | 22span | GalNAc | −86.5 ± 5.5 | −86.9 ± 5.4 | −90.5 ± 4.1 |
| D-2013 | 5043 | 3 | 4 | 22span | GalNAc | −77.8 ± 15.6 | −78.8 ± 15.2 | −85.1 ± 10.8 |
| D-2022 | 5043 | 3 | 4 | 22span | GalNAc | −79.2 ± 5.7 | −80.3 ± 5 | −87.6 ± 3.7 |
| D-2044 | 5043 | 3 | 4 | 22span | GalNAc | −72.4 ± 32.6 | −70.3 ± 37.2 | −82 ± 21.7 |
| D-2048 | 5043 | 3 | 4 | 22span | GalNAc | −64.1 ± 18.9 | −66.2 ± 18.5 | −76.3 ± 10.2 |
| D-2053 | 5043 | 3 | 4 | 22span | GalNAc | −83.7 ± 5 | −84.9 ± 4.9 | −89.8 ± 3.2 |
| D-2042 | 5274 | 3 | 4 | 22span | GalNAc | −58.7 ± 23.5 | −62.9 ± 21.2 | −74.4 ± 14.3 |
| D-2046 | 5274 | 3 | 4 | 22span | GalNAc | −51.9 ± 37.4 | −55.9 ± 32.1 | −70.4 ± 18.9 |
| D-2051 | 5274 | 3 | 4 | 22span | GalNAc | −71.2 ± 14.4 | −72.6 ± 13 | −82.1 ± 8.2 |
| D-2079 | 5274 | 3 | 4 | 22span | GalNAc | −83.4 ± 6.6 | −84.7 ± 5.8 | −89.1 ± 5.1 |
| D-2080 | 5274 | 3 | 4 | 22span | GalNAc | −84.7 ± 4.6 | −85.2 ± 4.4 | −90.1 ± 2.6 |
| D-2081 | 5274 | 3 | 4 | 22span | GalNAc | −83.1 ± 11 | −83.7 ± 10.8 | −88.5 ± 8.3 |
| D-2082 | 5274 | 3 | 4 | 22span | GalNAc | −60.4 ± 18.6 | −61.8 ± 18 | −75 ± 9.5 |
| D-2083 | 5274 | 3 | 4 | 22span | GalNAc | −72.3 ± 21.8 | −73.2 ± 20.8 | −82.2 ± 11.4 |
| D-2059 | 4412 | 3 | 4 | 22span | GalNAc | −53.8 ± 19 | −52.8 ± 26 | −68.3 ± 10.9 |
| D-2058 | 4412 | 3 | 4 | 22span | GalNAc | −76.9 ± 18.2 | −76.6 ± 20.2 | −83.9 ± 11.5 |
| D-2060 | 4412 | 3 | 4 | 22span | GalNAc | −62.4 ± 17.8 | −60.8 ± 18.1 | −74.6 ± 11.4 |
| D-1774 | 5276 | 3 | 4 | 22span | GalNAc | −59.9 ± 14.9 | −59.8 ± 15.9 | −74 ± 6.8 |
| D-2084 | 5276 | 3 | 4 | 22span | GalNAc | −46.3 ± 25.2 | −47.5 ± 23.2 | −65.6 ± 13.1 |
| D-1955 | 4412 | 3 | 4 | 22span | GalNAc | −88.2 ± 5.2 | −87.8 ± 5.5 | −88.1 ± 4.7 |
| D-2091 | 4412 | 3 | 4 | 22span | GalNAc | −89.2 ± 2.4 | −89.4 ± 2.9 | −90.6 ± 1 |
| D-2061 | 4412 | 3 | 4 | 22span | GalNAc | −93.3 ± 3 | −93.5 ± 2.9 | −93.6 ± 3.1 |
| D-2041 | 4412 | 3 | 4 | 22span | GalNAc | −60.5 ± 18.9 | −60.7 ± 18.9 | −69 ± 13.4 |
| D-2045 | 4412 | 3 | 4 | 22span | GalNAc | −80 ± 12 | −80.2 ± 10 | −82.6 ± 10.5 |
| D-2050 | 4412 | 3 | 4 | 22span | GalNAc | −56.1 ± 55.5 | −58.3 ± 50.9 | −62.3 ± 44.7 |
| D-2057 | 4412 | 3 | 4 | 22span | GalNAc | −76.7 ± 14.4 | −78.8 ± 11.8 | −76.9 ± 12.4 |
| D-1970 | 5249 | 3 | 4 | 22span | GalNAc | −82.4 ± 13 | −83.5 ± 11.9 | −82.9 ± 13 |
| D-2076 | 5249 | 3 | 4 | 22span | GalNAc | −60.6 ± 11.6 | −65 ± 9.7 | −66.8 ± 10.1 |
| D-2078 | 5249 | 3 | 4 | 22span | GalNAc | −72.6 ± 17.4 | −74 ± 16.1 | −70.8 ± 20.2 |
| D-1768 | 5247 | 3 | 4 | 22span | GalNAc | −83.6 ± 10.3 | −83.8 ± 10 | −83.3 ± 9.6 |
| D-2075 | 5247 | 3 | 4 | 22span | GalNAc | −88.6 ± 10 | −89.2 ± 9.1 | −87.8 ± 11 |
| D-2077 | 5247 | 3 | 4 | 22span | GalNAc | −93 ± 2.2 | −92.7 ± 2.6 | −94.5 ± 1 |
| D-1597 | 1333 | 3 | 4 | 22span | GalNAc | −83.4 ± 9.3 | −83.3 ± 9.2 | −86.8 ± 7.4 |
| D-2006 | 1333 | 3 | 4 | 22span | GalNAc | −79.3 ± 9.7 | −79.2 ± 9.6 | −79.7 ± 9.9 |
| D-2015 | 1333 | 3 | 4 | 22span | GalNAc | −65.3 ± 12.8 | −66 ± 12.1 | −72 ± 8.2 |
| D-2090 | 4999 | 3 | 4 | 22span | GalNAc | −94.5 ± 1.8 | −94 ± 2.1 | −94.6 ± 1.6 |
| D-2093 | 5274 | 3 | 4 | 22span | GalNAc | −81.6 ± 13 | −79.6 ± 15.1 | −86.9 ± 7.1 |
| D-1899 | 5276 | 3 | 4 | 22span | GalNAc | −78.5 ± 10.1 | −78.2 ± 9.9 | −83.4 ± 5.9 |

[0234] Testing of FAM13A-directed siRNA molecules within the AAV human FAM13A mouse model showed that a variety of different regions within FAM13A mRNA can be targeted to effectively reduce FAM13A expression. As shown in FIG. 6, the effective siRNA triggers targeted regions throughout the FAM13A mRNA transcript (SEQ ID NO: 1). In the above tables, the region targeted by the siRNA is specified by the trigger family, which refers to the first nucleotide in the range of nucleotides of SEQ ID NO: 1 that is targeted by a given siRNA molecule.

[0235] Trigger families that achieved a maximum knockdown of between 40-60% relative to vehicle control (for at least one probe set with at least one duplex) were T-1328, T-1631, T-1666, T-2343, T-2417, T-2623, T-2886, T-2887, T-2889, T-3133, T-3187, T-3189, T-3498, T-3499, T-4008, T-4109, T-4485, T-4927, T-4989, T-4993, T-4996, T-4998, T-5060, and T-5114.

[0236] Trigger families that achieved a maximum knockdown of between 60-80% relative to vehicle control (for at least one probe set with at least one duplex) were T-1678, T-2263, T-4834, T-4932, T-4957, T-4995, and T-5204. Exemplary duplexes within these families that proved effective in reducing FAM13A expression by 60-80% included D-1615, D-1695, and D-1867 from trigger family T-1678; D-1573 from trigger family T-2263; D-1781, D-1894, D-1906, D-1918, and D-1930 from trigger family T-4834; D-1783, D-1895, D-1907, and D-1931 from trigger family T-4932; D-1631, D-1696, D-1703, D-1717, D-1724, and D-1731 from trigger family T-4957; D-2036 from T-4995; and D-1792, D-1898, and D-1928 from trigger family T-5204.

[0237] Trigger families that achieved greater than 80% knockdown relative to vehicle control (for at least one probe set with at least one duplex) were T-1309, T-1333, T-2080, T-2144, T-3000, T-4412, T-4717, T-4999, T-5042, T-5043, T-5045, T-5080, T-5247, T-5249, T-5274, and T-5276. Exemplary duplexes within these families that proved effective in reducing FAM13A expression by greater than 80% included D-1667, D-1686, and D-1849 from trigger family T-1309; D-1597, D-1853, and D-2017 from trigger family T-1333; D-1680, D-1685, and D-1690 from trigger family T-2080; D-1682 and D-1858 from trigger family T-2144; D-1557, D-1650, and D-1861 from trigger family T-3000; D-1955 from trigger family T-4412; D-1896 from trigger family T-4717; D-1614, D-1697, D-1702, D-1709, D-1856, D-1863, D-1865, D-1866, D-1869, D-1873, D-1877, D-1878, D-1879, D-1880, D-1881, D-1884, D-1887, D-1987, D-1992, D-1997, and D-2002 from trigger family T-4999; D-2040 from trigger family T-5042; D-1698, D-1705, D-1864, D-1870, D-1875, D-1883, D-1886, D-1980, D-1984, D-1989, D-1994, and D-2004 from trigger family T-5043; D-1699, D-1612, D-1704, D-1868, D-1871, D-1876, D-1885, D-1888, D-1979, D-1983, D-1988, D-1993, D-1998, and D-2003 from trigger family T-5045; D-1623, D-1846, D-1862, D-1981, D-1985, D-1990, D-1995, D-2000, and D-2005 from trigger family T-5080; D-1768, D-2075, and D-2077 from trigger family T-5247; D-1970 from trigger family T-5249; D-1972 from trigger family T-5274; and D-1975, D-1991, D-1976, D-1977, D-1982, D-1996, and D-2001 from trigger family T-5276.

[0238] In testing a range of different modification patterns for some trigger families, it was found that some triggers consistently facilitated high levels of knockdown of FAM13A knockdown. For example, 31 different modification patterns were tested in the above AAV-based experiments using the T-4999 trigger family sequence (D-1614, D-1697, D-1702, D-1709, D-1716, D-1723, D-1730, D-1737, D-1856, D-1863, D-1865, D-1866, D-1869, D-1872, D-1877, D-1878, D-1879, D-1880, D-1881, D-1884, D-1887, D-1978, D-1987, D-1992, D-1997, D-2002, D-2008, D-2017, D-2049, D-2054, and D-2090; see Table 2 for sense and antisense sequences, and modification patterns used, in these duplexes). Each of these duplexes utilized a different modification pattern in the context of the same sense and antisense sequences (SEQ ID NOs: 498 and 1042). Of these duplexes, 25 modification patterns were observed to facilitate greater than 80% knockdown of FAM13A mRNA in at least one assay, and the remaining 6 were observed to facilitate between 60% and 80% knockdown in at least one assay. These data indicate that the T-4999 trigger family is a particularly effective and reliable trigger for reducing FAM13A expression.

[0239] Another effective and reliable trigger family is the T-5043 trigger family. For this family, 25 different modification patterns were tested in the above AAV-based experiments (D-1611, D-1698, D-1705, D-1712, D-1719, D-1726, D-1733, D-1740, D-1855, D-1864, D-1870, D-1875, D-1883, D-1886, D-1980, D-1984, D-1989, D-1994, D-1999, D-2004, D-2013, D-2022, D-2044, D-2048, and D-2053; see Table 2 for sense and antisense sequences, and modification patterns used, in these duplexes). Each of these duplexes utilized a different modification pattern in the context of the same sense and antisense sequences (SEQ ID NOs: 503 and 1047). Of these duplexes, 16 modification patterns were observed to facilitate greater than 80% knockdown of FAM13A mRNA in at least one assay, 8 were observed to facilitate between 60% and 80% knockdown in at least one assay, and 1 was observed to facilitate between 40% and 60% knockdown of FAM13A mRNA in at least one assay.

[0240] A third particularly effective trigger family is the T-5045 trigger family (whose target sequence largely overlaps with the T-5043 trigger family). For this family, 25 different modification patterns were tested in the above AAV-based experiments (D-1612, D-1699, D-1704, D-1711, D-1718, D-1725, D-1732, D-1739, D-1868, D-1871, D-1876, D-1882, D-1885, D-1888, D-1979, D-1983, D-1988, D-1993, D-1998, D-2003, D-2012, D-2021, D-2043, D-2047, and D-2052; see Table 2 for sense and antisense sequences, and modification patterns used, in these duplexes). Each of these duplexes utilized a different modification pattern in the context of the same sense and antisense sequences (SEQ ID NOs: 504 and 1048). Of these duplexes, 18 modification patterns were observed to facilitate greater than 80% knockdown of FAM13A mRNA in at least one assay, and 7 were observed to facilitate between 60% and 80% knockdown in at least one assay.

[0241] Other trigger families that were able to show effective knockdown with multiple modification patterns included the T-1309, T-1333, T-2144, T-3000, T-5080, and T-5226 trigger families.

[0242] From a broad perspective, testing a wide range of triggers across the FAM13A transcript revealed that which regions of the transcript were susceptible to RNAi-mediated knockdown. FIG. 6 is a diagram compiling the locations of where different effective trigger families target the FAM13A mRNA transcript (as provided in SEQ ID NO: 1), along with categorizing the maximal degree to which those trigger families were able to knock down FAM13A expression in the above AAV-based assays. The triggers were divided according to whether the maximum observed knockdown for that trigger fell within the range of 40-60% knockdown, 60-80% knockdown, or greater than 80% knockdown.

[0243] As shown in FIG. 6, one region of the human FAM13A mRNA transcript that is particularly susceptive to RNAi-based knockdown is the portion between nucleotides 4900 and 5300 of the FAM13A mRNA transcript. Within this small region, 24 distinct trigger families were identified that facilitated knockdown of FAM13A, most of which were validated with multiple different duplexes having different modification patterns. These families included 12 trigger families that facilitated greater than 80% knockdown, 5 families that facilitated between 60% and 80% knockdown, and 7 families that facilitated between 40% and 60% knockdown. This unexpected concentration of successful targets indicates that targeting between nucleotides 4900 and 5300 is a particularly useful strategy for knocking down FAM13A expression.

[0244] Other regions that also were susceptible at multiple target locations included nucleotides 1300-1375, nucleotides 1625-1700, and nucleotides 2075-2175. Therefore, these data also indicate that targeting any of these regions is a useful strategy for knocking down FAM13A expression.

[0245] These AAV-based experiments also tested the effectiveness of conjugating different ligands to siRNA duplexes in facilitating knockdown in different tissues. FIGS. 8A-8D and Table 14 show the results of testing FAM13A siRNA from the T-4999 and T-5043 families, when the duplexes had been conjugated to either GalNAc (Formula VII) or the fatty acid C22. In these figures, the “*” denotes those duplexes that were conjugated to C22, while those without an asterisk were conjugated to GalNAc. Knockdown data was gathered both the liver and adipose tissue, after systemic administration. GalNAc-conjugated duplexes were administered at 3 mg/kg, while C22 conjugated triggers were administered at 20 mg/kg. All of the tested T-4999 and T-5043 duplexes were able to reduce expression of FAM13A in the liver. In the adipose tissue, the GalNAc-conjugated triggers were less effective in reducing FAM13A expression, with some having no detectable effect. In contrast, the C22-conjugated triggers consistently facilitated reduction of FAM13A expression in adipose tissue to a similar degree as they facilitated in the liver. Examination of these data in combination with studies of weight, fat mass, and metabolic characterization (see Examples 2, 6, and 7) indicates that GalNAc targeting is surprisingly able to achieve similar results to C22 targeting, despite having less effect on FAM13A expression in biologically significant adipose tissue.

[0246] The above data also allows for comparison of linkages used to attach C22 to siRNA duplexes. The two tested linkages are through a phosphodiester bond (PO) and through a phosphorothioate bond (PS). Unexpectedly, linking C22 with PS led to significantly better knockdown than linking with PO. This was observed through comparison of pairs of duplexes, which only differ in their conjugation method. For example, one T-4999 trigger family pair showed an increase of 43% in knockdown when switching from PO to PS linkage (compare D-1697 (PO; 37% KD) and D-1856 (PS; 80% KD)). Another T-4999 trigger family pair showed a more modest increase of 6% in knockdown when switching from PO to PS linkage (compare D-1869 (PO; 74% KD) and D-1887 (PS; 80% KD)). A T-5080 trigger family pair showed an increase of 25% in knockdown when switching from PO to PS linkage (compare D-1846 (PO; 44% KD) and D-1862 (PS; 69% KD)). A T-5043 trigger family pair showed an increase of 45% in knockdown when switching from PO to PS linkage (compare D-1698 (PO; 13% KD) and D-1855 (PS; 58% KD)). Another T-5043 trigger family pair showed an increase of 30% in knockdown when switching from PO to PS linkage (compare D-1875 (PO; 40% KD) and D-1886 (PS; 70% KD)). And a T-5045 trigger family pair showed an increase of 38% in knockdown when switching from PO to PS linkage (compare D-1871 (PO; 27% KD) and (D-1882 (PS; 65% KD)). These and other data in Tables 4-17 above show that linking C22 to a siRNA duplex with PS unexpectedly and consistently led to significantly better knockdown than linking to that same siRNA duplex with PO.

### Example 6: In Vivo Knockdown of Endogenous Murine Fam13a in Obesity Model

[0247] To determine which human siRNA duplexes (see Examples 4 and 5) would be suitable for testing with endogenous murine Fam13a knockdown experiments, effective trigger families (see Examples 4 and 5 above) were reviewed for cross-reactivity with murine Fam13a mRNA. This review found that the T-4999 trigger family aligned with the murine Fam13a sequence for all except one base of its sequence. Hypothesizing that this might be sufficient to still show knockdown activity, experiments were undertaken to assess the efficacy of T-4999 FAM13A siRNA molecules on endogenous murine Fam13a mRNA in the diet-induced obesity (DIO) model in C57BL/6 mice.

[0248] Three duplexes from the T-4999 trigger family were chosen for this assay: D-1709 (GalNAc conjugated via PS), D-1869 (C22 conjugated via PO), and D-1887 (C22 conjugated via PS). Duplexes D-2086 (GalNAc conjugated via PS) and D-2087 (C22 conjugated via PS), which target human FAM13A but were not predicted to bind mouse FAM13A, were used as negative controls. D-2086 (GalNAc conjugated via PS) and D-2087 (C22 conjugated via PS), two duplexes that fully match the murine Fam13a mRNA sequence, were also tested.

[0249] Male C57BL6 mice were fed a diet containing high fat content (Research Diets D12492, 60% kcal derived from fat) beginning at 5 weeks of age. When the mice reached 19 weeks of age (14 weeks on the high-fat diet), the mice received a subcutaneous injection of buffer (PBS) or the FAM13A siRNA molecule at a dose of 3 mg/kg body mass or 20 mg/kg body mass in PBS (n=8 mice per group). Body mass was measured continuously throughout the study. Body composition was measured by NMR (EchoMRI 3n1 Body Composition Analyzer) at baseline (2 days prior to injection) and on day 25 post-injection. Liver and subcutaneous white adipose tissue (ScWAT) were collected 4 weeks following siRNA administration and analyzed.

[0250] RNA from harvested animal tissues was processed for qPCR analysis. RNA was isolated from 50-100 mg tissue using RNeasy 96 universal tissue kit RNA isolation protocol following manufacturer's instructions (Qiagen). Real-time PCR was performed using TaqMan® RNA-to-Ct™ 1-Step Kit following manufacturer's instructions (ThermoFisher) with 50 ng RNA per reaction and a primer probe set complementary to the murine Fam13a mRNA. A percentage change in murine Fam13a mRNA in liver or ScWAT for each animal was calculated relative to the level of murine Fam13a mRNA in the liver or ScWAT of animals administered PBS buffer control.

[0251] Results of these studies are shown in FIGS. 9A-9C and FIGS. 10A-10B. These figures show the level of knockdown achieved in each mouse's liver, inguinal WAT, and epididymal WAT. Each of the non-targeting control siRNA duplexes displayed expression levels the same as buffer-only control mice (in all three tissues).

[0252] In the liver, all the Fam13a-directed duplexes effectively reduced expression of murine Fam13a (FIG. 9A). The GalNAc-linked duplexes, D-2086 and D-1709, reduced Fam13a expression in the liver equivalently (by 62% and 63%, respectively). This showed that the T-4999 duplex (D-1709) was effective despite having one mismatch with the target sequence. Each of the C22-linked duplexes also facilitated Fam13a knockdown in the liver, with D-2087 resulting in 76% knockdown, D-1869 resulting in 55% knockdown, and D-1887 resulting in 69% knockdown.

[0253] In inguinal WAT, the C22-linked duplexes were more effective than the GalNAc-linked duplexes in reducing murine Fam13a expression. The GalNAc-linked duplexes, D-2086 and D-1709, reduced expression in the liver by 8% and 19%, respectively. In contrast, the C22-linked duplexes resulted in Fam13a knockdown at similar levels to that achieved in the liver: D-2087 resulted in 66% knockdown, D-1869 resulted in 60% knockdown, and D-1887 resulted in 62% knockdown.

[0254] In epididymal WAT, less knockdown was observed than in the other two tissue types. Neither of the GalNAc-linked duplexes resulted in significant knockdown of murine Fam13a. In contrast, the C22-linked duplexes resulted in some Fam13a knockdown: D-2087 resulted in 22% knockdown, D-1869 resulted in 26% knockdown, and D-1887 resulted in 26% knockdown.

[0255] FIG. 10A shows the effects of siRNA treatment on the body weight of the DIO mice. Untreated and control treated mice had a 5-8% increase in body weight over the course of the experiment. Treatment with any of the Fam13a duplexes decreased or prevented that weight gain. The GalNAc-linked duplexes, D-2086 and D-1709, limited the weight gain to 2% and 4%, respectively. The C22-linked duplexes also limited the weight gain, with D-2087 actually resulting in a 1% weight loss for the mice, D-1869 limiting the gain to 2%, and D-1887 limiting the gain to 3%.

[0256] FIG. 10B shows the effects of siRNA treatment on the fat mass of the DIO mice. Untreated and control treated mice had an 8-9% increase in fat mass over the course of the experiment. Treatment with any of the Fam13a duplexes decreased or prevented that weight gain. The GalNAc-linked duplexes, D-2086 and D-1709, limited the weight gain to 6% and 4%, respectively. The C22-linked duplexes also limited the weight gain, with D-2087 actually resulting in a 2% weight loss for the mice, D-1869 limiting the gain to 3%, and D-1887 limiting the gain to 3%.

[0257] These data provide further support for FAM13A siRNA (and the T-4999 trigger family specifically) being used for a variety of purposes, such as reducing abdominal adiposity, reducing body weight, reducing fat mass, improving metabolic parameters including insulin resistance and non-alcoholic steatohepatitis (NASH), and reducing risk of myocardial infarction.

### Example 7: FAM13A siRNA in Nonhuman Primates

[0258] To assess the efficacy of the FAM13A siRNA molecules in a nonhuman primate model, top performing FAM13A siRNA molecules from the in vitro and in vivo activity assays described in Examples 4 and 5 were evaluated for in vivo efficacy using cynomolgus monkeys. In particular, triggers from the T-4999 and T-5043 families were selected. Because the selected triggers target a sequence present in both human and cynomolgus FAM13A mRNA, it was expected that they would also be effective in knocking down endogenous cynomolgus FAM13A.

[0259] For these experiments, the sense strand in each tested siRNA molecule was conjugated to the trivalent GalNAc moiety shown in Formula VII or to docosanoic acid (C22), using the methods described in Example 3. Accordingly, the experiment used the T-4999 duplexes T-1709 (GalNAc conjugated via PS) and D-1887 (C22 conjugated via PS), and the T-5043 duplexes D-1705 (GalNAc conjugated via PS) and D-1886 (C22 conjugated via PS).

[0260] The study design is provided in Table 18 below. Briefly, there were N=3 animals per treatment group (naïve and non-naïve, female, lean cynomolgus monkeys, Cambodian origin, 3 years old). A single subcutaneous dose was administered in the mid-scapular region to each animal. Liver tissue biopsies were collected pre-dose on day −14 or day −11, and post-dose on days 14, 30, and 45 (relative to dosing on day 0). Adipose tissue biopsies were collected pre-dose on day −14 or day −11 (omental fat), and post-dose on days 14 (falciform fat), 30 (omental fat), and 45 (omental and falciform fat). Blood for clinical chemistry analysis was collected via femoral vein on days −14 (prior to biopsy), −7, 7, 14 (prior to biopsy), 20, 25, 30 (prior to biopsy), 35, and 45 (prior to necropsy). Animals were fasted on days −14, 14, and 30 due to the tissue biopsy collection procedures.

TABLE 18
NHP Study Design

| | | | | | | Dose | Dose |
|---|---|---|---|---|---|---|---|
| | | SIRNA | Trigger | | Dose | Level | Conc. |
| Group | Animals | Duplex | Family | Carrier | Route | (mg/kg) | (mg/mL) |
| 1 | 3 | D-1709 | 4999 | GalNAc | SC | 3 | 0.6 |
| 2 | 3 | D-1887 | 4999 | C22 | SC | 20 | 4 |
| 3 | 3 | D-1705 | 5043 | GalNAc | SC | 3 | 0.6 |
| 4 | 3 | D-1886 | 5043 | C22 | SC | 20 | 4 |

[0261] For analysis of FAM13A knockdown level in liver and adipose tissue, the total RNA was isolated from 10 to 20 mg tissue for each tissue sample from each time point. A cDNA sample was then prepared from each total RNA sample and diluted 1:10 for ddPCR analysis. A cynomolgus FAM13A primer/probe set and a cynomolgus PPIB primer/probe set was used in the analysis. The percent mRNA knockdown was calculated relative to the pre-dose FAM13A expression level for each individual animal and then averaged across timepoints.

[0262] The data on knockdown of FAM13A mRNA levels in the liver is shown in FIG. 11A. The most effective duplex in the liver was D-1709, the GalNAc-conjugated siRNA from the T-4999 trigger family. In the liver, the single dose of D-1709 reduced FAM13A mRNA levels by an average of 81% by day 14, and the knockdown was maintained at day 30 (77%) and day 45 (80%) without any subsequent treatment. The duplex D-1887, which is identical to D-1709 aside from being C22-conjugated, was almost as effective as D-1709 (albeit at a higher dose). The single dose of D-1887 reduced FAM13A mRNA levels by an average of 68% by day 14, and the knockdown was increased on day 30 (71%) and day 45 (75%) without any subsequent treatment.

[0263] FIG. 11A also shows the liver knockdown achieved by two duplexes from the T-5043 trigger family. The single dose of D-1705 (GalNAc) reduced FAM13A mRNA levels by an average of 58% by day 14, and the knockdown was maintained at day 30 (52%) and day 45 (48%) without any subsequent treatment. However, the knockdown was much higher in two of the animals, as one of the three treated animals was a possible outlier that exhibited minimal knockdown. The other duplex in the T-5043 family, D-1886 (C22), reduced FAM13A mRNA levels by an average of 45% by day 14, but the knockdown levels decreased by day 30 (35%) and day 45 (8.4%).

[0264] FIG. 11B shows the data on knockdown of FAM13A mRNA in the adipose tissue. The most effective duplexes in the adipose tissue were D-1887 (T-4999; C22) and D-1886 (T-5043; C22). The single dose of D-1887 reduced FAM13A mRNA levels by an average of 83% by day 14, and the knockdown was maintained on day 30 (80%) and day 45 (75%) without any subsequent treatment. Similarly, the single dose of D-1886 reduced FAM13A mRNA levels by an average of 79% by day 14, and the knockdown was maintained on day 30 (64%) and day 45 (83%) without any subsequent treatment. The two GalNAc conjugated duplexes demonstrated a lag time in silencing activity but were also effective in knocking down FAM13A. The single dose of D-1709 reduced FAM13A mRNA levels by an average of 11% by day 14, and the knockdown increased at day 30 (45%) and day 45 (56%) without any subsequent treatment. The single dose of D-1705 had minimal effects on FAM13A mRNA levels at day 14 (decreased 19%) and day 30 (increased 15%), but an average knockdown of 55% was observed on day 45.

[0265] FIGS. 11C-11E show results of the clinical chemistry analysis performed on blood serum samples from the treated animals. For all of the tested duplexes, there was a consistent approximately 20% or greater decrease in serum cholesterol (FIG. 11C), serum LDL (FIG. 11D), and serum HDL (FIG. 11E) between 20 and 30 days after siRNA treatment. These decreases are consistent with the effects of FAM13A-targeted siRNA on the blood chemistry of mice (see Example 2 and FIG. 5). Accordingly, these data provide further support for FAM13A siRNA (and the T-4999 and T-5043 trigger families specifically) being used for a variety of purposes, such as reducing abdominal adiposity, reducing body weight, reducing fat mass, improving metabolic parameters including insulin resistance and non-alcoholic steatohepatitis (NASH), and reducing risk of myocardial infarction.

[0266] Further evidence for the efficacy of FAM13A siRNA in treatment of such conditions will be gathered through the use of obese cynomolgus monkeys. These animals will be monitored after the administration of the T-4999 duplexes T-1709 (GalNAc conjugated via PS) and D-1887 (C22 conjugated via PS), and the T-5043 duplexes D-1705 (GalNAc conjugated via PS) and D-1886 (C22 conjugated via PS). The weight, fat mass, blood chemistry, and other metabolic parameters will be monitored and correlated with the knockdown of FAM13A expression in both the liver and adipose tissue.

1. An RNAi construct comprising a sense strand and an antisense strand, wherein the sense strand comprises a sequence that is sufficiently complementary to the sequence of the antisense strand to form a duplex region, and
wherein the antisense strand comprises:
(a) a region that has substantial identity to at least 15 contiguous nucleotides within nucleotides 1300-1375 or 4900-5300 of the FAM13A mRNA sequence set forth in SEQ ID NO: 1, such that there are no more than 2 mismatches between the antisense strand's region of substantial identity and the contiguous nucleotides; or
(b) a region that has substantial identity to at least 15 contiguous nucleotides from an antisense sequence listed in Table 1 or Table 2, such that there are no more than 2 mismatches between the antisense strand's region of substantial identity and the contiguous nucleotides.

2-5. (canceled)

6. The RNAi construct of claim 1, wherein the sense strand and antisense strand form a duplex region of about 15 to about 30 base pairs in length.

7. (canceled)

8. The RNAi construct of claim 6, wherein the duplex region is about 19 to about 21 base pairs in length.

9. (canceled)

10. The RNAi construct of claim 6, wherein the sense strand and the antisense strand are each independently about 19 to about 23 nucleotides in length.

11. (canceled)

12. The RNAi construct of claim 1, wherein the RNAi construct comprises one or two nucleotide overhangs of 1 to 4 unpaired nucleotides.

13-14. (canceled)

15. The RNAi construct of claim 1, wherein the RNAi construct comprises one or more modified nucleotides.

16-17. (canceled)

18. The RNAi construct of claim 15, wherein all the nucleotides in the sense and antisense strands are modified nucleotides.

19. The RNAi construct of claim 18, wherein the modified nucleotides are 2′-O-methyl modified nucleotides, 2′-fluoro modified nucleotides, or a combination thereof.

20. The RNAi construct of claim 1, wherein the sense strand comprises an abasic nucleotide as the terminal nucleotide at its 3′ end, its 5′ end, or both its 3′ and 5′ ends.

21. (canceled)

22. The RNAi construct of claim 1, wherein the sense strand, the antisense strand, or both the sense and antisense strands comprise one or more phosphorothioate internucleotide linkages.

23-25. (canceled)

26. The RNAi construct of claim 1, wherein the antisense strand comprises or consists of a sequence selected from the antisense sequences listed in Table 1 or Table 2.

27. The RNAi construct of claim 1, wherein the sense strand comprises a sequence selected from the sense sequences listed in Table 1 or Table 2.

28. The RNAi construct of claim 1, wherein the sense and antisense strands, respectively, comprise SEQ ID NOs: 15 and 559, SEQ ID NOs: 24 and 568, SEQ ID NOs: 125 and 669, SEQ ID NOs: 127 and 671, SEQ ID NOs: 222 and 766, SEQ ID NOs: 406 and 950, SEQ ID NOs: 448 and 992, SEQ ID NOs: 498 and 1042, SEQ ID NOs: 502 and 1046, SEQ ID NOs: 503 and 1047, SEQ ID NOs: 504 and 1048, SEQ ID NOs: 513 and 1057, SEQ ID NOs: 526 and 1070, SEQ ID NOs: 527 and 1071, SEQ ID NOs: 533 and 1077, or SEQ ID NOs: 534 and 1078.

29. (canceled)

30. The RNAi construct of claim 28, wherein the sense and antisense strands, respectively, comprise SEQ ID NOs: 498 and 1042.

31. The RNAi construct of claim 1, wherein the RNAi construct is D-1557, D-1597, D-1612, D-1614, D-1623, D-1650, D-1667, D-1680, D-1682, D-1685, D-1686, D-1690, D-1697, D-1698, D-1699, D-1702, D-1704, D-1705, D-1709, D-1768, D-1846, D-1849, D-1853, D-1856, D-1858, D-1861, D-1862, D-1863, D-1864, D-1865, D-1866, D-1868, D-1869, D-1870, D-1871, D-1873, D-1875, D-1876, D-1877, D-1878, D-1879, D-1880, D-1881, D-1883, D-1884, D-1885, D-1886, D-1887, D-1888, D-1899, D-1896, D-1955, D-1970, D-1972, D-1975, D-1976, D-1977, D-1979, D-1980, D-1981, D-1982, D-1983, D-1984, D-1985, D-1987, D-1988, D-1989, D-1990, D-1991, D-1992, D-1993, D-1994, D-1995, D-1996, D-1997, D-1998, D-2000, D-2001, D-2002, D-2003, D-2004, D-2005, D-2012, D-2013, D-2014, D-2017, D-2021, D-2022, D-2023, D-2040, D-2044, D-2045, D-2047, D-2049, D-2051, D-2052, D-2053, D-2054, D-2058, D-2061, D-2075, D-2077, D-2079, D-2080, D-2081, D-2083, D-2090, D-2091, or D-2093.

32. (canceled)

33. The RNAi construct of claim 1, wherein the sense and antisense strands, respectively, comprise SEQ ID NOs: 1800 and 2648 (D-1709) or SEQ ID NOs: 2861 and 3115 (D-1887).

34. The RNAi construct of claim 1, wherein the RNAi construct further comprises a ligand.

35-36. (canceled)

37. The RNAi construct of claim 34, wherein the ligand comprises a multivalent galactose moiety or multivalent N-acetyl-galactosamine moiety.

38. The RNAi construct of claim 37, wherein the multivalent galactose moiety or multivalent N-acetyl-galactosamine moiety is trivalent or tetravalent.

39. The RNAi construct of claim 34, wherein the ligand is a long-chain fatty acid.

40. (canceled)

41. The RNAi construct of claim 39, wherein the long-chain fatty acid is docosanoic acid (C22).

42-43. (canceled)

44. The RNAi construct of claim 34, wherein the ligand is attached through a phosphodiester or phosphorothioate linkage.

45. A pharmaceutical composition comprising the RNAi construct of claim 1 and a pharmaceutically acceptable carrier or excipient.

46. A method for reducing the expression of FAM13A protein in a patient in need thereof comprising administering to the patient the RNAi construct of claim 1.

47-48. (canceled)

49. The method of claim 46, wherein the patient is diagnosed with or at risk for obesity, abdominal obesity, NASH, hepatosteatosis, insulin resistance, type 2 diabetes, hypertriglyceridemia, or hypercholesterolemia.

50. A method for reducing the body weight or fat mass of a patient comprising administering to the patient the RNAi construct of claim 1.

51. (canceled)

52. The method of claim 50, wherein the waist to hip ratio is greater than 1.0.

53. The method of claim 50, wherein the patient has been diagnosed with abdominal obesity.

54. The method of claim 46, wherein the RNAi construct or pharmaceutical composition is administered to the patient via a parenteral route of administration.

55-57. (canceled)

58. A method of reducing body weight or fat mass by administering an RNAi construct comprising a sense strand, an antisense strand, and a ligand that targets delivery to hepatocytes, wherein the antisense sense strand has a sequence that is complementary to a FAM13 mRNA sequence.

59. (canceled)

60. The method of claim 58, wherein the antisense strand comprises a region comprising a sequence that is substantially complementary to at least 15 contiguous nucleotides within nucleotides 1300-1375 or 4900-5300 of the FAM13A mRNA sequence set forth in SEQ ID NO: 1.

61. The method of claim 58, wherein the antisense strand comprises a region comprising a sequence that is substantially complementary to a FAM13A mRNA sequence, and wherein said region comprises at least 15 contiguous nucleotides from an antisense sequence listed in Table 1 or Table 2.

62-84. (canceled)

85. The method of claim 58, wherein the antisense strand or sense strand comprises a sequence selected from the antisense sequences listed in Table 1 or Table 2.

86. (canceled)

87. The method of claim 58, wherein the sense and antisense strands, respectively, comprise SEQ ID NOs: 15 and 559, SEQ ID NOs: 24 and 568, SEQ ID NOs: 125 and 669, SEQ ID NOs: 127 and 671, SEQ ID NOs: 222 and 766, SEQ ID NOs: 406 and 950, SEQ ID NOs: 448 and 992, SEQ ID NOs: 498 and 1042, SEQ ID NOs: 502 and 1046, SEQ ID NOs: 503 and 1047, SEQ ID NOs: 504 and 1048, SEQ ID NOs: 513 and 1057, SEQ ID NOs: 526 and 1070, SEQ ID NOs: 527 and 1071, SEQ ID NOs: 533 and 1077, or SEQ ID NOs: 534 and 1078.

88. (canceled)

89. The method of claim 87, wherein the sense and antisense strands, respectively, comprise SEQ ID NOs: 498 and 1042.

90. The method of any claim 58, wherein the RNAi construct is D-1557, D-1597, D-1612, D-1614, D-1623, D-1650, D-1667, D-1680, D-1682, D-1685, D-1686, D-1690, D-1697, D-1698, D-1699, D-1702, D-1704, D-1705, D-1709, D-1768, D-1846, D-1849, D-1853, D-1856, D-1858, D-1861, D-1862, D-1863, D-1864, D-1865, D-1866, D-1868, D-1869, D-1870, D-1871, D-1873, D-1875, D-1876, D-1877, D-1878, D-1879, D-1880, D-1881, D-1883, D-1884, D-1885, D-1886, D-1887, D-1888, D-1899, D-1896, D-1955, D-1970, D-1972, D-1975, D-1976, D-1977, D-1979, D-1980, D-1981, D-1982, D-1983, D-1984, D-1985, D-1987, D-1988, D-1989, D-1990, D-1991, D-1992, D-1993, D-1994, D-1995, D-1996, D-1997, D-1998, D-2000, D-2001, D-2002, D-2003, D-2004, D-2005, D-2012, D-2013, D-2014, D-2017, D-2021, D-2022, D-2023, D-2040, D-2044, D-2045, D-2047, D-2049, D-2051, D-2052, D-2053, D-2054, D-2058, D-2061, D-2075, D-2077, D-2079, D-2080, D-2081, D-2083, D-2090, D-2091, or D-2093.

91. (canceled)

92. The method of claim 58, wherein the sense and antisense strands, respectively, comprise SEQ ID NOs: 1800 and 2648 (D-1709) or SEQ ID NOs: 2861 and 3115 (D-1887).

93-97. (canceled)

The application's sequence listing, which the Patent Office published only in electronic form, follows.

SEQUENCE LISTING (3338 sequences)

SEQ ID NO: 1 - DNA, 5858 bp, Homo sapiens
  source 1..5858: mol_type = unassigned DNA
ccttccagccatgtgggttcagcggaaagagaagcaaaaccactcttcctaaaatgttagaagctgctcttcgcttaccttggggcctttgcattgggagctgtttttcacatcaaagaatatgtgctgaatggaattttagtattttgctgtcgttttaatattttcgtctggtcttcctcagttcttccagacgctttctgagagaatgggggcaggagctctagccatctgtcaaagtaaagcagcggttcggctgaaagaagacatgaaaaagatagtggcagtgccattaaatgaacagaaggattttacctatcagaagttatttggagtcagtctccaagaacttgaacggcaggggctcaccgagaatggcattccagcagtagtgtggaatatagtggaatatttgacgcagcatggacttacccaagaaggtctttttagggtgaatggtaacgtgaaggtggtggaacaacttcgactgaagttcgagagtggagtgcccgtggagctcgggaaggacggtgatgtctgctcagcagccagtctgttgaagctgtttctgagggagctgcctgacagtctgatcacctcagcgttgcagcctcgattcattcaactctttcaggatggcagaaatgatgttcaggagagtagcttaagagacttaataaaagagctgccagacacccactactgcctcctcaagtacctttgccagttcttgacaaaagtagccaagcatcatgtgcagaatcgcatgaatgttcacaatctcgccactgtatttgggccaaattgctttcatgtgccacctgggcttgaaggcatgaaggaacaggacctgtgcaacaagataatggctaaaattctagaaaattacaataccctgtttgaagtagagtatacagaaaatgatcatctgagatgtgaaaacctggctaggcttatcatagtaaaagaggtctattataagaactccctgcccatccttttaacaagaggcttagaaagagacatgccaaaaccacctccaaaaaccaagatcccaaaatccaggagtgagggatctattcaggcccacagagtactgcaaccagagctatctgatggcattcctcagctcagcttgcggctaagttatagaaaagcctgcttggaagacatgaattcagcagagggtgctattagtgccaagttggtacccagttcacaggaagatgaaagacctctgtcacctttctatttgagtgctcatgtaccccaagtcagcaatgtgtctgcaaccggagaactcttagaaagaaccatccgatcagctgtagaacaacatctttttgatgttaataactctggaggtcaaagttcagaggactcagaatctggaacactatcagcatcttctgccacatctgccagacagcgccgccgccagtccaaggagcaggatgaagttcgacatgggagagacaagggacttatcaacaaagaaaatactccttctgggttcaaccaccttgatgattgtattttgaatactcaggaagtcgaaaaggtacacaaaaatacttttggttgtgctggagaaaggagcaagcctaaacgtcagaaatccagtactaaactttctgagcttcatgacaatcaggacggtcttgtgaatatggaaagtctcaattccacacgatctcatgagagaactggacctgatgattttgaatggatgtctgatgaaaggaaaggaaatgaaaaagatggtggacacactcagcattttgagagccccacaatgaagatccaggagcatcccagcctatctgacaccaaacagcagagaaatcaagatgccggtgaccaggaggagagctttgtctccgaagtgccccagtcggacctgactgcattgtgtgatgaaaagaactgggaagagcctatccctgctttctcctcctggcagcgggagaacagtgactctgatgaagcccacctctcgccgcaggctgggcgcctgatccgtcagctgctggacgaagacagcgaccccatgctctctcctcggttctacgcttatgggcagagcaggcaatacctggatgacacagaagtgcctccttccccaccaaactcccattctttcatgaggcggcgaagctcctctctggggtcctatgatgatgagcaagaggacctgacacctgcccagctcacacgaaggattcagagccttaaaaagaagatccggaagtttgaagatagattcgaagaagagaagaagtacagaccttcccacagtgacaaagcagccaatccggaggttctgaaatggacaaatgaccttgccaaattccggagacaacttaaagaatcaaaactaaagatatctgaagaggacctaactcccaggatgcggcagcgaagcaacacactccccaagagttttggttcccaacttgagaaagaagatgagaagaagcaagagctggtggataaagcaataaagcccagtgttgaagccacattggaatctattcagaggaagctccaggagaagcgagcggaaagcagccgccctgaggacattaaggatatgaccaaagaccagattgctaatgagaaagtggctctgcagaaagctctgttatattatgaaagcattcatggacggccggtaacaaagaacgaacggcaggtgatgaagccactatacgacaggtaccggctggtcaaacagatcctctcccgagctaacaccatacccatcattggttccccctccagcaagcggagaagccctttgctgcagccaattatcgagggcgaaactgcttccttcttcaaggagataaaggaagaagaggaggggtcagaagacgatagcaatgtgaagccagacttcatggtcactctgaaaaccgatttcagtgcacgatgctttctggaccaattcgaagatgacgctgatggatttatttccccaatggatgataaaataccatcaaaatgcagccaggacacagggctttcaaatctccatgctgcctcaatacctgaactcctggaacacctccaggaaatgagagaagaaaagaaaaggattcgaaagaaacttcgggattttgaagacaactttttcagacagaatggaagaaatgtccagaaggaagaccgcactcctatggctgaagaatacagtgaatataagcacataaaggcgaaactgaggctcctggaggtgctcatcagcaagagagacactgattccaagtccatgtgaggggcatggccaagcacagggggctggcagctgcggtgagagtttactgtccccagagaaagtgcagctctggaaggcagccttggggctggccctgcaaagcatgcagcccttctgcctctagaccatttggcatcggctcctgtttccattgcctgccttagaaactggctggaagaagacaatgtgacctgacttaggcattttgtaattggaaagtcaagactgcagtatgtgcacatgcgcacgcgcatgcacgcacacacacacacagtagtggagctttcctaacactagcagagattaatcactacattagacaacactcatctacagagaatatacactgttcttccctggataactgagaaacaagagaccattctctgtctaactgtgataaaaacaagctcaggactttattctatagagcaaacttgctgtggagggccatgctctccttggacccagttaactgcaaacgtgcattggagccctatttgctgccgctgccattctagtgacctttccacagagctgcgccttcctcacgtgtgtgaaaggttttccccttcagccctcaggtagatggaagctgcatctgcccacgatggcagtgcagtcatcatcttcaggatgtttcttcaggacttcctcagctgacaaggaattttggtccctgcctaggaccgggtcatctgcagaggacagagagatggtaagcagctgtatgaatgctgattttaaaaccaggtcatgggagaagagcctggagattctttcctgaacactgactgcacttaccagtctgattttatcgtcaaacaccaagccaggctagcatgctcatggcaatctgtttggggctgttttgttgtggcactagccaaacataaaggggcttaagtcagcctgcatacagaggatcggggagagaaggggcctgtgttctcagcctcctgagtacttaccagagtttaatttttttaaaaaaaatctgcactaaaatccccaaactgacaggtaaatgtagccctcagagctcagcccaaggcagaatctaaatcacactattttcgagatcatgtataaaaagaaaaaaaagaagtcatgctgtgtggccaattataatttttttcaaagactttgtcacaaaactgtctatattagacattttggagggaccaggaaatgtaagacaccaaatcctccatctcttcagtgtgcctgatgtcacctcatgatttgctgttacttttttaactcctgcgccaaggacagtgggttctgtgtccacctttgtgctttgcgaggccgagcccaggcatctgctcgcctgccacggctgaccagagaaggtgcttcaggagctctgccttagacgacgtgttacagtatgaacacacagcagaggcaccctcgtatgttttgaaagttgccttctgaaagggcacagttttaaggaaaagaaaaagaatgtaaaactatactgacccgttttcagttttaaagggtcgtgagaaactggctggtccaatgggatttacagcaacattttccattgctgaagtgaggtagcagctctcttctgtcagctgaatgttaaggatggggaaaaagaatgcctttaagtttgctcttaatcgtatggaagcttgagctatgtgttggaagtgccctggttttaatccatacacaaagacggtacataatcctacaggtttaaatgtacataaaaatatagtttggaattctttgctctactgtttacattgcagattgctataatttcaaggagtgagattataaataaaatgatgcactttaggatgtttcctatttttgaaatctgaacatgaatcattcacatgaccaaaaattgtgtttttttaaaaatacatgtctagtctgtcctttaatagctctcttaaataagctatgatattaatcagatcattaccagttagcttttaaagcacatttgtttaagactatgtttttggaaaaatacgctacagaatttttttttaagctacaaataaatgagatgctactaattgttttggaatctgttgtttctgccaaaggtaaattaactaaagatttattcaggaatccccatttgaatttgtatgattcaataaaagaaaacaccaagtaagttatataaaataaattgtgtatgagatgttgtgttttcctttgtaatttccactaactaactaactaacttatattcttcatggaatggagcccagaagaaatgagaggaagcccttttcacactagatcttatttgaagaaatgtttgttagtcagtcagtcagtggtttctggctctgccgagggagatgtgttccccagcaaccatttctgcagcccagaatctcaaggcactagaggcggtgtcttaattaattggcttcacaaagacaaaatgctctggactgggatttttcctttgctgtgttgggaatatgtgtttattaattagcacatgccaacaaaataaatgtcaagagttatttcataagtgtaagtaaacttaagaattaaagagtgcagacttataattttc

SEQ ID NO: 2 - RNA, 21 nt, synthetic construct
  source 1..21: mol_type = other RNA
catgtaccccaagtcagcaat

SEQ ID NO: 3 - RNA, 21 nt, synthetic construct
  source 1..21: mol_type = other RNA
tgtaccccaagtcagcaatgt

SEQ ID NO: 4 - RNA, 21 nt, synthetic construct
  source 1..21: mol_type = other RNA
gtaccccaagtcagcaatgtg

SEQ ID NO: 5 - RNA, 21 nt, synthetic construct
  source 1..21: mol_type = other RNA
gcaatgtgtctgcaaccggag

SEQ ID NO: 6 - RNA, 21 nt, synthetic construct
  source 1..21: mol_type = other RNA
caatgtgtctgcaaccggaga

SEQ ID NO: 7 - RNA, 21 nt, synthetic construct
  source 1..21: mol_type = other RNA
aatgtgtctgcaaccggagaa

SEQ ID NO: 8 - RNA, 21 nt, synthetic construct
  source 1..21: mol_type = other RNA
tgtgtctgcaaccggagaact

SEQ ID NO: 9 - RNA, 21 nt, synthetic construct
  source 1..21: mol_type = other RNA
gtgtctgcaaccggagaactc

SEQ ID NO: 10 - RNA, 21 nt, synthetic construct
  source 1..21: mol_type = other RNA
tgtctgcaaccggagaactct

SEQ ID NO: 11 - RNA, 21 nt, synthetic construct
  source 1..21: mol_type = other RNA
gtctgcaaccggagaactctt

SEQ ID NO: 12 - RNA, 21 nt, synthetic construct
  source 1..21: mol_type = other RNA
tctgcaaccggagaactctta

SEQ ID NO: 13 - RNA, 21 nt, synthetic construct
  source 1..21: mol_type = other RNA
ctgcaaccggagaactcttag

SEQ ID NO: 14 - RNA, 21 nt, synthetic construct
  source 1..21: mol_type = other RNA
tgcaaccggagaactcttaga

SEQ ID NO: 15 - RNA, 21 nt, synthetic construct
  source 1..21: mol_type = other RNA
gcaaccggagaactcttagaa

SEQ ID NO: 16 - RNA, 21 nt, synthetic construct
  source 1..21: mol_type = other RNA
aaccggagaactcttagaaag

SEQ ID NO: 17 - RNA, 21 nt, synthetic construct
  source 1..21: mol_type = other RNA
tcttagaaagaaccatccgat

SEQ ID NO: 18 - RNA, 21 nt, synthetic construct
  source 1..21: mol_type = other RNA
cttagaaagaaccatccgatc

SEQ ID NO: 19 - RNA, 21 nt, synthetic construct
  source 1..21: mol_type = other RNA
ttagaaagaaccatccgatca

SEQ ID NO: 20 - RNA, 21 nt, synthetic construct
  source 1..21: mol_type = other RNA
agaaagaaccatccgatcagc

SEQ ID NO: 21 - RNA, 21 nt, synthetic construct
  source 1..21: mol_type = other RNA
aaagaaccatccgatcagctg

SEQ ID NO: 22 - RNA, 21 nt, synthetic construct
  source 1..21: mol_type = other RNA
aagaaccatccgatcagctgt

SEQ ID NO: 23 - RNA, 21 nt, synthetic construct
  source 1..21: mol_type = other RNA
gaaccatccgatcagctgtag

SEQ ID NO: 24 - RNA, 21 nt, synthetic construct
  source 1..21: mol_type = other RNA
accatccgatcagctgtagaa

SEQ ID NO: 25 - RNA, 21 nt, synthetic construct
  source 1..21: mol_type = other RNA
ccgatcagctgtagaacaaca

SEQ ID NO: 26 - RNA, 21 nt, synthetic construct
  source 1..21: mol_type = other RNA
gatgttaataactctggaggt

SEQ ID NO: 27 - RNA, 21 nt, synthetic construct
  source 1..21: mol_type = other RNA
taataactctggaggtcaaag

SEQ ID NO: 28 - RNA, 21 nt, synthetic construct
  source 1..21: mol_type = other RNA
ataactctggaggtcaaagtt

SEQ ID NO: 29 - RNA, 21 nt, synthetic construct
  source 1..21: mol_type = other RNA
atctggaacactatcagcatc

SEQ ID NO: 30 - RNA, 21 nt, synthetic construct
  source 1..21: mol_type = other RNA
aggatgaagttcgacatggga

SEQ ID NO: 31 - RNA, 21 nt, synthetic construct
  source 1..21: mol_type = other RNA
gttcgacatgggagagacaag

SEQ ID NO: 32 - RNA, 21 nt, synthetic construct
  source 1..21: mol_type = other RNA
cgacatgggagagacaaggga

SEQ ID NO: 33 - RNA, 21 nt, synthetic construct
  source 1..21: mol_type = other RNA
acatgggagagacaagggact

SEQ ID NO: 34 - RNA, 21 nt, synthetic construct
  source 1..21: mol_type = other RNA
atgggagagacaagggactta

SEQ ID NO: 35 - RNA, 21 nt, synthetic construct
  source 1..21: mol_type = other RNA
gggagagacaagggacttatc

SEQ ID NO: 36 - RNA, 21 nt, synthetic construct
  source 1..21: mol_type = other RNA
ggagagacaagggacttatca

SEQ ID NO: 37 - RNA, 21 nt, synthetic construct
  source 1..21: mol_type = other RNA
gagagacaagggacttatcaa

SEQ ID NO: 38 - RNA, 21 nt, synthetic construct
  source 1..21: mol_type = other RNA
gacaagggacttatcaacaaa

SEQ ID NO: 39 - RNA, 21 nt, synthetic construct
  source 1..21: mol_type = other RNA
acaagggacttatcaacaaag

SEQ ID NO: 40 - RNA, 21 nt, synthetic construct
  source 1..21: mol_type = other RNA
gggacttatcaacaaagaaaa

SEQ ID NO: 41 - RNA, 21 nt, synthetic construct
  source 1..21: mol_type = other RNA
aagaaaatactccttctgggt

SEQ ID NO: 42 - RNA, 21 nt, synthetic construct
  source 1..21: mol_type = other RNA
atactccttctgggttcaacc

SEQ ID NO: 43 - RNA, 21 nt, synthetic construct
  source 1..21: mol_type = other RNA
gttcaaccaccttgatgattg

SEQ ID NO: 44 - RNA, 21 nt, synthetic construct
  source 1..21: mol_type = other RNA
ttcaaccaccttgatgattgt

SEQ ID NO: 45 - RNA, 21 nt, synthetic construct
  source 1..21: mol_type = other RNA
ttgaatactcaggaagtcgaa

SEQ ID NO: 46 - RNA, 21 nt, synthetic construct
  source 1..21: mol_type = other RNA
actcaggaagtcgaaaaggta

SEQ ID NO: 47 - RNA, 21 nt, synthetic construct
  source 1..21: mol_type = other RNA
ctcaggaagtcgaaaaggtac

SEQ ID NO: 48 - RNA, 21 nt, synthetic construct
  source 1..21: mol_type = other RNA
tcaggaagtcgaaaaggtaca

SEQ ID NO: 49 - RNA, 21 nt, synthetic construct
  source 1..21: mol_type = other RNA
aggaagtcgaaaaggtacaca

SEQ ID NO: 50 - RNA, 21 nt, synthetic construct
  source 1..21: mol_type = other RNA
tcgaaaaggtacacaaaaata

SEQ ID NO: 51 - RNA, 21 nt, synthetic construct
  source 1..21: mol_type = other RNA
cgaaaaggtacacaaaaatac

SEQ ID NO: 52 - RNA, 21 nt, synthetic construct
  source 1..21: mol_type = other RNA
gagaaaggagcaagcctaaac

SEQ ID NO: 53 - RNA, 21 nt, synthetic construct
  source 1..21: mol_type = other RNA
agaaaggagcaagcctaaacg

SEQ ID NO: 54 - RNA, 21 nt, synthetic construct
  source 1..21: mol_type = other RNA
gaaaggagcaagcctaaacgt

SEQ ID NO: 55 - RNA, 21 nt, synthetic construct
  source 1..21: mol_type = other RNA
aggagcaagcctaaacgtcag

SEQ ID NO: 56 - RNA, 21 nt, synthetic construct
  source 1..21: mol_type = other RNA
ggagcaagcctaaacgtcaga

SEQ ID NO: 57 - RNA, 21 nt, synthetic construct
  source 1..21: mol_type = other RNA
gagcaagcctaaacgtcagaa

SEQ ID NO: 58 - RNA, 21 nt, synthetic construct
  source 1..21: mol_type = other RNA
agcaagcctaaacgtcagaaa

SEQ ID NO: 59 - RNA, 21 nt, synthetic construct
  source 1..21: mol_type = other RNA
gcaagcctaaacgtcagaaat

SEQ ID NO: 60 - RNA, 21 nt, synthetic construct
  source 1..21: mol_type = other RNA
caagcctaaacgtcagaaatc

SEQ ID NO: 61 - RNA, 21 nt, synthetic construct
  source 1..21: mol_type = other RNA
aagcctaaacgtcagaaatcc

SEQ ID NO: 62 - RNA, 21 nt, synthetic construct
  source 1..21: mol_type = other RNA
gtcagaaatccagtactaaac

SEQ ID NO: 63 - RNA, 21 nt, synthetic construct
  source 1..21: mol_type = other RNA
tcagaaatccagtactaaact

SEQ ID NO: 64 - RNA, 21 nt, synthetic construct
  source 1..21: mol_type = other RNA
tttctgagcttcatgacaatc

SEQ ID NO: 65 - RNA, 21 nt, synthetic construct
  source 1..21: mol_type = other RNA
agcttcatgacaatcaggacg

SEQ ID NO: 66 - RNA, 21 nt, synthetic construct
  source 1..21: mol_type = other RNA
ttcatgacaatcaggacggtc

SEQ ID NO: 67 - RNA, 21 nt, synthetic construct
  source 1..21: mol_type = other RNA
tcatgacaatcaggacggtct

SEQ ID NO: 68 - RNA, 21 nt, synthetic construct
  source 1..21: mol_type = other RNA
catgacaatcaggacggtctt

SEQ ID NO: 69 - RNA, 21 nt, synthetic construct
  source 1..21: mol_type = other RNA
atgacaatcaggacggtcttg

SEQ ID NO: 70 - RNA, 21 nt, synthetic construct
  source 1..21: mol_type = other RNA
tgacaatcaggacggtcttgt

SEQ ID NO: 71 - RNA, 21 nt, synthetic construct
  source 1..21: mol_type = other RNA
gacaatcaggacggtcttgtg

SEQ ID NO: 72 - RNA, 21 nt, synthetic construct
  source 1..21: mol_type = other RNA
acaatcaggacggtcttgtga

SEQ ID NO: 73 - RNA, 21 nt, synthetic construct
  source 1..21: mol_type = other RNA
aatcaggacggtcttgtgaat

SEQ ID NO: 74 - RNA, 21 nt, synthetic construct
  source 1..21: mol_type = other RNA
atcaggacggtcttgtgaata

SEQ ID NO: 75 - RNA, 21 nt, synthetic construct
  source 1..21: mol_type = other RNA
tcaggacggtcttgtgaatat

SEQ ID NO: 76 - RNA, 21 nt, synthetic construct
  source 1..21: mol_type = other RNA
ggtcttgtgaatatggaaagt

SEQ ID NO: 77 - RNA, 21 nt, synthetic construct
  source 1..21: mol_type = other RNA
gaaagtctcaattccacacga

SEQ ID NO: 78 - RNA, 21 nt, synthetic construct
  source 1..21: mol_type = other RNA
aaagtctcaattccacacgat

SEQ ID NO: 79 - RNA, 21 nt, synthetic construct
  source 1..21: mol_type = other RNA
aagtctcaattccacacgatc

SEQ ID NO: 80 - RNA, 21 nt, synthetic construct
  source 1..21: mol_type = other RNA
agtctcaattccacacgatct

SEQ ID NO: 81 - RNA, 21 nt, synthetic construct
  source 1..21: mol_type = other RNA
gtctcaattccacacgatctc

SEQ ID NO: 82 - RNA, 21 nt, synthetic construct
  source 1..21: mol_type = other RNA
tctcaattccacacgatctca

SEQ ID NO: 83 - RNA, 21 nt, synthetic construct
  source 1..21: mol_type = other RNA
ctcaattccacacgatctcat

SEQ ID NO: 84 - RNA, 21 nt, synthetic construct
  source 1..21: mol_type = other RNA
tcaattccacacgatctcatg

SEQ ID NO: 85 - RNA, 21 nt, synthetic construct
  source 1..21: mol_type = other RNA
caattccacacgatctcatga

SEQ ID NO: 86 - RNA, 21 nt, synthetic construct
  source 1..21: mol_type = other RNA
attccacacgatctcatgaga

SEQ ID NO: 87 - RNA, 21 nt, synthetic construct
  source 1..21: mol_type = other RNA
ttccacacgatctcatgagag

SEQ ID NO: 88 - RNA, 21 nt, synthetic construct
  source 1..21: mol_type = other RNA
tccacacgatctcatgagaga

SEQ ID NO: 89 - RNA, 21 nt, synthetic construct
  source 1..21: mol_type = other RNA
cacgatctcatgagagaactg

SEQ ID NO: 90 - RNA, 21 nt, synthetic construct
  source 1..21: mol_type = other RNA
tctcatgagagaactggacct

SEQ ID NO: 91 - RNA, 21 nt, synthetic construct
  source 1..21: mol_type = other RNA
tcatgagagaactggacctga

SEQ ID NO: 92 - RNA, 21 nt, synthetic construct
  source 1..21: mol_type = other RNA
catgagagaactggacctgat

SEQ ID NO: 93 - RNA, 21 nt, synthetic construct
  source 1..21: mol_type = other RNA
ttgaatggatgtctgatgaaa

SEQ ID NO: 94 - RNA, 21 nt, synthetic construct
  source 1..21: mol_type = other RNA
ggtggacacactcagcatttt

SEQ ID NO: 95 - RNA, 21 nt, synthetic construct
  source 1..21: mol_type = other RNA
tttgagagccccacaatgaag

SEQ ID NO: 96 - RNA, 21 nt, synthetic construct
  source 1..21: mol_type = other RNA
atcccagcctatctgacacca

SEQ ID NO: 97 - RNA, 21 nt, synthetic construct
  source 1..21: mol_type = other RNA
tcccagcctatctgacaccaa

SEQ ID NO: 98 - RNA, 21 nt, synthetic construct
  source 1..21: mol_type = other RNA
cccagcctatctgacaccaaa

SEQ ID NO: 99 - RNA, 21 nt, synthetic construct
  source 1..21: mol_type = other RNA
ccagcctatctgacaccaaac

SEQ ID NO: 100 - RNA, 21 nt, synthetic construct
  source 1..21: mol_type = other RNA
cagcctatctgacaccaaaca

SEQ ID NO: 101 - RNA, 21 nt, synthetic construct
  source 1..21: mol_type = other RNA
agcagagaaatcaagatgccg

SEQ ID NO: 102 - RNA, 21 nt, synthetic construct
  source 1..21: mol_type = other RNA
gagctttgtctccgaagtgcc

SEQ ID NO: 103 - RNA, 21 nt, synthetic construct
  source 1..21: mol_type = other RNA
tgtctccgaagtgccccagtc

SEQ ID NO: 104 - RNA, 21 nt, synthetic construct
  source 1..21: mol_type = other RNA
ctccgaagtgccccagtcgga

SEQ ID NO: 105 - RNA, 21 nt, synthetic construct
  source 1..21: mol_type = other RNA
tccgaagtgccccagtcggac

SEQ ID NO: 106 - RNA, 21 nt, synthetic construct
  source 1..21: mol_type = other RNA
agaactgggaagagcctatcc

SEQ ID NO: 107 - RNA, 21 nt, synthetic construct
  source 1..21: mol_type = other RNA
gaactgggaagagcctatccc

SEQ ID NO: 108 - RNA, 21 nt, synthetic construct
  source 1..21: mol_type = other RNA
aagagcctatccctgctttct

SEQ ID NO: 109 - RNA, 21 nt, synthetic construct
  source 1..21: mol_type = other RNA
aggctgggcgcctgatccgtc

SEQ ID NO: 110 - RNA, 21 nt, synthetic construct
  source 1..21: mol_type = other RNA
ggctgggcgcctgatccgtca

SEQ ID NO: 111 - RNA, 21 nt, synthetic construct
  source 1..21: mol_type = other RNA
gctgggcgcctgatccgtcag

SEQ ID NO: 112 - RNA, 21 nt, synthetic construct
  source 1..21: mol_type = other RNA
ctgggcgcctgatccgtcagc

SEQ ID NO: 113 - RNA, 21 nt, synthetic construct
  source 1..21: mol_type = other RNA
tgggcgcctgatccgtcagct

SEQ ID NO: 114 - RNA, 21 nt, synthetic construct
  source 1..21: mol_type = other RNA
ctggacgaagacagcgacccc

SEQ ID NO: 115 - RNA, 21 nt, synthetic construct
  source 1..21: mol_type = other RNA
accccatgctctctcctcggt

SEQ ID NO: 116 - RNA, 21 nt, synthetic construct
  source 1..21: mol_type = other RNA
catgctctctcctcggttcta

SEQ ID NO: 117 - RNA, 21 nt, synthetic construct
  source 1..21: mol_type = other RNA
atgctctctcctcggttctac

SEQ ID NO: 118 - RNA, 21 nt, synthetic construct
  source 1..21: mol_type = other RNA
gctctctcctcggttctacgc

SEQ ID NO: 119 - RNA, 21 nt, synthetic construct
  source 1..21: mol_type = other RNA
ctctctcctcggttctacgct

SEQ ID NO: 120 - RNA, 21 nt, synthetic construct
  source 1..21: mol_type = other RNA
tctctcctcggttctacgctt

SEQ ID NO: 121 - RNA, 21 nt, synthetic construct
  source 1..21: mol_type = other RNA
ctctcctcggttctacgctta

SEQ ID NO: 122 - RNA, 21 nt, synthetic construct
  source 1..21: mol_type = other RNA
tctcctcggttctacgcttat

SEQ ID NO: 123 - RNA, 21 nt, synthetic construct
  source 1..21: mol_type = other RNA
ctcctcggttctacgcttatg

SEQ ID NO: 124 - RNA, 21 nt, synthetic construct
  source 1..21: mol_type = other RNA
tcctcggttctacgcttatgg

SEQ ID NO: 125 - RNA, 21 nt, synthetic construct
  source 1..21: mol_type = other RNA
cctcggttctacgcttatggg

SEQ ID NO: 126 - RNA, 21 nt, synthetic construct
  source 1..21: mol_type = other RNA
ctcggttctacgcttatgggc

SEQ ID NO: 127 - RNA, 21 nt, synthetic construct
  source 1..21: mol_type = other RNA
caccaaactcccattctttca

SEQ ID NO: 128 - RNA, 21 nt, synthetic construct
  source 1..21: mol_type = other RNA
ccaaactcccattctttcatg

SEQ ID NO: 129 - RNA, 21 nt, synthetic construct
  source 1..21: mol_type = other RNA
ctcccattctttcatgaggcg

SEQ ID NO: 130 - RNA, 21 nt, synthetic construct
  source 1..21: mol_type = other RNA
cattctttcatgaggcggcga

SEQ ID NO: 131 - RNA, 21 nt, synthetic construct
  source 1..21: mol_type = other RNA
attctttcatgaggcggcgaa

SEQ ID NO: 132 - RNA, 21 nt, synthetic construct
  source 1..21: mol_type = other RNA
ttctttcatgaggcggcgaag

SEQ ID NO: 133 - RNA, 21 nt, synthetic construct
  source 1..21: mol_type = other RNA
tctttcatgaggcggcgaagc

SEQ ID NO: 134 - RNA, 21 nt, synthetic construct
  source 1..21: mol_type = other RNA
ctttcatgaggcggcgaagct

SEQ ID NO: 135 - RNA, 21 nt, synthetic construct
  source 1..21: mol_type = other RNA
tttcatgaggcggcgaagctc

SEQ ID NO: 136 - RNA, 21 nt, synthetic construct
  source 1..21: mol_type = other RNA
tctctggggtcctatgatgat

SEQ ID NO: 137 - RNA, 21 nt, synthetic construct
  source 1..21: mol_type = other RNA
acacctgcccagctcacacga

SEQ ID NO: 138 - RNA, 21 nt, synthetic construct
  source 1..21: mol_type = other RNA
cacctgcccagctcacacgaa

SEQ ID NO: 139 - RNA, 21 nt, synthetic construct
  source 1..21: mol_type = other RNA
cctgcccagctcacacgaagg

SEQ ID NO: 140 - RNA, 21 nt, synthetic construct
  source 1..21: mol_type = other RNA
ccagctcacacgaaggattca

SEQ ID NO: 141 - RNA, 21 nt, synthetic construct
  source 1..21: mol_type = other RNA
agctcacacgaaggattcaga

SEQ ID NO: 142 - RNA, 21 nt, synthetic construct
  source 1..21: mol_type = other RNA
atccggaagtttgaagataga

SEQ ID NO: 143 - RNA, 21 nt, synthetic construct
  source 1..21: mol_type = other RNA
cggaagtttgaagatagattc

SEQ ID NO: 144 - RNA, 21 nt, synthetic construct
  source 1..21: mol_type = other RNA
agtttgaagatagattcgaag

SEQ ID NO: 145 - RNA, 21 nt, synthetic construct
  source 1..21: mol_type = other RNA
gtttgaagatagattcgaaga

SEQ ID NO: 146 - RNA, 21 nt, synthetic construct
  source 1..21: mol_type = other RNA
gaagatagattcgaagaagag

SEQ ID NO: 147 - RNA, 21 nt, synthetic construct
  source 1..21: mol_type = other RNA
agaagaagtacagaccttccc

SEQ ID NO: 148 - RNA, 21 nt, synthetic construct
  source 1..21: mol_type = other RNA
gaagaagtacagaccttccca

SEQ ID NO: 149 - RNA, 21 nt, synthetic construct
  source 1..21: mol_type = other RNA
aagaagtacagaccttcccac

SEQ ID NO: 150 - RNA, 21 nt, synthetic construct
  source 1..21: mol_type = other RNA
tctgaaatggacaaatgacct

SEQ ID NO: 151 - RNA, 21 nt, synthetic construct
  source 1..21: mol_type = other RNA
ctgaaatggacaaatgacctt

SEQ ID NO: 152 - RNA, 21 nt, synthetic construct
  source 1..21: mol_type = other RNA
acaaatgaccttgccaaattc

SEQ ID NO: 153 - RNA, 21 nt, synthetic construct
  source 1..21: mol_type = other RNA
aaatgaccttgccaaattccg

SEQ ID NO: 154 - RNA, 21 nt, synthetic construct
  source 1..21: mol_type = other RNA
aatgaccttgccaaattccgg

SEQ ID NO: 155 - RNA, 21 nt, synthetic construct
  source 1..21: mol_type = other RNA
tgaccttgccaaattccggag

SEQ ID NO: 156 - RNA, 21 nt, synthetic construct
  source 1..21: mol_type = other RNA
gaccttgccaaattccggaga

SEQ ID NO: 157 - RNA, 21 nt, synthetic construct
  source 1..21: mol_type = other RNA
accttgccaaattccggagac

SEQ ID NO: 158 - RNA, 21 nt, synthetic construct
  source 1..21: mol_type = other RNA
ccttgccaaattccggagaca

SEQ ID NO: 159 - RNA, 21 nt, synthetic construct
  source 1..21: mol_type = other RNA
ccggagacaacttaaagaatc

SEQ ID NO: 160 - RNA, 21 nt, synthetic construct
  source 1..21: mol_type = other RNA
cggagacaacttaaagaatca

SEQ ID NO: 161 - RNA, 21 nt, synthetic construct
  source 1..21: mol_type = other RNA
agatatctgaagaggacctaa

SEQ ID NO: 162 - RNA, 21 nt, synthetic construct
  source 1..21: mol_type = other RNA
gaggacctaactcccaggatg

SEQ ID NO: 163 - RNA, 21 nt, synthetic construct
  source 1..21: mol_type = other RNA
gacctaactcccaggatgcgg

SEQ ID NO: 164 - RNA, 21 nt, synthetic construct
  source 1..21: mol_type = other RNA
acctaactcccaggatgcggc

SEQ ID NO: 165 - RNA, 21 nt, synthetic construct
  source 1..21: mol_type = other RNA
tgcggcagcgaagcaacacac

SEQ ID NO: 166 - RNA, 21 nt, synthetic construct
  source 1..21: mol_type = other RNA
gcggcagcgaagcaacacact

SEQ ID NO: 167 - RNA, 21 nt, synthetic construct
  source 1..21: mol_type = other RNA
cagcgaagcaacacactcccc

SEQ ID NO: 168 - RNA, 21 nt, synthetic construct
  source 1..21: mol_type = other RNA
gcgaagcaacacactccccaa

SEQ ID NO: 169 - RNA, 21 nt, synthetic construct
  source 1..21: mol_type = other RNA
gcaacacactccccaagagtt

SEQ ID NO: 170 - RNA, 21 nt, synthetic construct
  source 1..21: mol_type = other RNA
caagagttttggttcccaact

SEQ ID NO: 171 - RNA, 21 nt, synthetic construct
  source 1..21: mol_type = other RNA
gagttttggttcccaacttga

SEQ ID NO: 172 - RNA, 21 nt, synthetic construct
  source 1..21: mol_type = other RNA
gttttggttcccaacttgaga

SEQ ID NO: 173 - RNA, 21 nt, synthetic construct
  source 1..21: mol_type = other RNA
ttgaagccacattggaatcta

SEQ ID NO: 174 - RNA, 21 nt, synthetic construct
  source 1..21: mol_type = other RNA
ccaggagaagcgagcggaaag

SEQ ID NO: 175 - RNA, 21 nt, synthetic construct
  source 1..21: mol_type = other RNA
gaccagattgctaatgagaaa

SEQ ID NO: 176 - RNA, 21 nt, synthetic construct
  source 1..21: mol_type = other RNA
gctaatgagaaagtggctctg

SEQ ID NO: 177 - RNA, 21 nt, synthetic construct
  source 1..21: mol_type = other RNA
agcattcatggacggccggta

SEQ ID NO: 178 - RNA, 21 nt, synthetic construct
  source 1..21: mol_type = other RNA
gcattcatggacggccggtaa

SEQ ID NO: 179 - RNA, 21 nt, synthetic construct
  source 1..21: mol_type = other RNA
cattcatggacggccggtaac

SEQ ID NO: 180 - RNA, 21 nt, synthetic construct
  source 1..21: mol_type = other RNA
attcatggacggccggtaaca

SEQ ID NO: 181 - RNA, 21 nt, synthetic construct
  source 1..21: mol_type = other RNA
ttcatggacggccggtaacaa

SEQ ID NO: 182 - RNA, 21 nt, synthetic construct
  source 1..21: mol_type = other RNA
tcatggacggccggtaacaaa

SEQ ID NO: 183 - RNA, 21 nt, synthetic construct
  source 1..21: mol_type = other RNA
atggacggccggtaacaaaga

SEQ ID NO: 184 - RNA, 21 nt, synthetic construct
  source 1..21: mol_type = other RNA
tggacggccggtaacaaagaa

SEQ ID NO: 185 - RNA, 21 nt, synthetic construct
  source 1..21: mol_type = other RNA
ggacggccggtaacaaagaac

SEQ ID NO: 186 - RNA, 21 nt, synthetic construct
  source 1..21: mol_type = other RNA
acggccggtaacaaagaacga

SEQ ID NO: 187 - RNA, 21 nt, synthetic construct
  source 1..21: mol_type = other RNA
cggccggtaacaaagaacgaa

SEQ ID NO: 188 - RNA, 21 nt, synthetic construct
  source 1..21: mol_type = other RNA
ggccggtaacaaagaacgaac

SEQ ID NO: 189 - RNA, 21 nt, synthetic construct
  source 1..21: mol_type = other RNA
gccggtaacaaagaacgaacg

SEQ ID NO: 190 - RNA, 21 nt, synthetic construct
  source 1..21: mol_type = other RNA
ccggtaacaaagaacgaacgg

SEQ ID NO: 191 - RNA, 21 nt, synthetic construct
  source 1..21: mol_type = other RNA
cggtaacaaagaacgaacggc

SEQ ID NO: 192 - RNA, 21 nt, synthetic construct
  source 1..21: mol_type = other RNA
ggtaacaaagaacgaacggca

SEQ ID NO: 193 - RNA, 21 nt, synthetic construct
  source 1..21: mol_type = other RNA
aaagaacgaacggcaggtgat

SEQ ID NO: 194 - RNA, 21 nt, synthetic construct
  source 1..21: mol_type = other RNA
atgaagccactatacgacagg

SEQ ID NO: 195 - RNA, 21 nt, synthetic construct
  source 1..21: mol_type = other RNA
gaagccactatacgacaggta

SEQ ID NO: 196 - RNA, 21 nt, synthetic construct
  source 1..21: mol_type = other RNA
aagccactatacgacaggtac

SEQ ID NO: 197 - RNA, 21 nt, synthetic construct
  source 1..21: mol_type = other RNA
agccactatacgacaggtacc

SEQ ID NO: 198 - RNA, 21 nt, synthetic construct
  source 1..21: mol_type = other RNA
gccactatacgacaggtaccg

SEQ ID NO: 199 - RNA, 21 nt, synthetic construct
  source 1..21: mol_type = other RNA
ccactatacgacaggtaccgg

SEQ ID NO: 200 - RNA, 21 nt, synthetic construct
  source 1..21: mol_type = other RNA
cactatacgacaggtaccggc

SEQ ID NO: 201 - RNA, 21 nt, synthetic construct
  source 1..21: mol_type = other RNA
actatacgacaggtaccggct

SEQ ID NO: 202 - RNA, 21 nt, synthetic construct
  source 1..21: mol_type = other RNA
aacagatcctctcccgagcta

SEQ ID NO: 203 - RNA, 21 nt, synthetic construct
  source 1..21: mol_type = other RNA
acagatcctctcccgagctaa

SEQ ID NO: 204 - RNA, 21 nt, synthetic construct
  source 1..21: mol_type = other RNA
agatcctctcccgagctaaca

SEQ ID NO: 205 - RNA, 21 nt, synthetic construct
  source 1..21: mol_type = other RNA
tcctctcccgagctaacacca

SEQ ID NO: 206 - RNA, 21 nt, synthetic construct
  source 1..21: mol_type = other RNA
cctctcccgagctaacaccat

SEQ ID NO: 207 - RNA, 21 nt, synthetic construct
  source 1..21: mol_type = other RNA
ctctcccgagctaacaccata

SEQ ID NO: 208 - RNA, 21 nt, synthetic construct
  source 1..21: mol_type = other RNA
tcccgagctaacaccataccc

SEQ ID NO: 209 - RNA, 21 nt, synthetic construct
  source 1..21: mol_type = other RNA
cccgagctaacaccataccca

SEQ ID NO: 210 - RNA, 21 nt, synthetic construct
  source 1..21: mol_type = other RNA
ggggtcagaagacgatagcaa

SEQ ID NO: 211 - RNA, 21 nt, synthetic construct
  source 1..21: mol_type = other RNA
gggtcagaagacgatagcaat

SEQ ID NO: 212 - RNA, 21 nt, synthetic construct
  source 1..21: mol_type = other RNA
gtcagaagacgatagcaatgt

SEQ ID NO: 213 - RNA, 21 nt, synthetic construct
  source 1..21: mol_type = other RNA
tcagaagacgatagcaatgtg

SEQ ID NO: 214 - RNA, 21 nt, synthetic construct
  source 1..21: mol_type = other RNA
gaagacgatagcaatgtgaag

SEQ ID NO: 215 - RNA, 21 nt, synthetic construct
  source 1..21: mol_type = other RNA
agacgatagcaatgtgaagcc

SEQ ID NO: 216 - RNA, 21 nt, synthetic construct
  source 1..21: mol_type = other RNA
atggtcactctgaaaaccgat

SEQ ID NO: 217 - RNA, 21 nt, synthetic construct
  source 1..21: mol_type = other RNA
tggtcactctgaaaaccgatt

SEQ ID NO: 218 - RNA, 21 nt, synthetic construct
  source 1..21: mol_type = other RNA
ggtcactctgaaaaccgattt

SEQ ID NO: 219 - RNA, 21 nt, synthetic construct
  source 1..21: mol_type = other RNA
gaaaaccgatttcagtgcacg

SEQ ID NO: 220 - RNA, 21 nt, synthetic construct
  source 1..21: mol_type = other RNA
aaccgatttcagtgcacgatg

SEQ ID NO: 221 - RNA, 21 nt, synthetic construct
  source 1..21: mol_type = other RNA
tatttccccaatggatgataa

SEQ ID NO: 222 - RNA, 21 nt, synthetic construct
  source 1..21: mol_type = other RNA
cccaatggatgataaaatacc

SEQ ID NO: 223 - RNA, 21 nt, synthetic construct
  source 1..21: mol_type = other RNA
caatggatgataaaataccat

SEQ ID NO: 224 - RNA, 21 nt, synthetic construct
  source 1..21: mol_type = other RNA
tggatgataaaataccatcaa

SEQ ID NO: 225 - RNA, 21 nt, synthetic construct
  source 1..21: mol_type = other RNA
aaataccatcaaaatgcagcc

SEQ ID NO: 226 - RNA, 21 nt, synthetic construct
  source 1..21: mol_type = other RNA
gggctttcaaatctccatgct

SEQ ID NO: 227 - RNA, 21 nt, synthetic construct
  source 1..21: mol_type = other RNA
ggctttcaaatctccatgctg

SEQ ID NO: 228 - RNA, 21 nt, synthetic construct
  source 1..21: mol_type = other RNA
aatctccatgctgcctcaata

SEQ ID NO: 229 - RNA, 21 nt, synthetic construct
  source 1..21: mol_type = other RNA
atctccatgctgcctcaatac

SEQ ID NO: 230 - RNA, 21 nt, synthetic construct
  source 1..21: mol_type = other RNA
tctccatgctgcctcaatacc

SEQ ID NO: 231 - RNA, 21 nt, synthetic construct
  source 1..21: mol_type = other RNA
ctgcctcaatacctgaactcc

SEQ ID NO: 232 - RNA, 21 nt, synthetic construct
  source 1..21: mol_type = other RNA
ctggaacacctccaggaaatg

SEQ ID NO: 233 - RNA, 21 nt, synthetic construct
  source 1..21: mol_type = other RNA
cttcgggattttgaagacaac

SEQ ID NO: 234 - RNA, 21 nt, synthetic construct
  source 1..21: mol_type = other RNA
ccagaaggaagaccgcactcc

SEQ ID NO: 235 - RNA, 21 nt, synthetic construct
  source 1..21: mol_type = other RNA
gaaggaagaccgcactcctat

SEQ ID NO: 236 - RNA, 21 nt, synthetic construct
  source 1..21: mol_type = other RNA
aaggaagaccgcactcctatg

SEQ ID NO: 237 - RNA, 21 nt, synthetic construct
  source 1..21: mol_type = other RNA
aggaagaccgcactcctatgg

SEQ ID NO: 238 - RNA, 21 nt, synthetic construct
  source 1..21: mol_type = other RNA
ggaagaccgcactcctatggc

SEQ ID NO: 239 - RNA, 21 nt, synthetic construct
  source 1..21: mol_type = other RNA
gaagaccgcactcctatggct

SEQ ID NO: 240 - RNA, 21 nt, synthetic construct
  source 1..21: mol_type = other RNA
agaccgcactcctatggctga

SEQ ID NO: 241 - RNA, 21 nt, synthetic construct
  source 1..21: mol_type = other RNA
ccgcactcctatggctgaaga

SEQ ID NO: 242 - RNA, 21 nt, synthetic construct
  source 1..21: mol_type = other RNA
taagcacataaaggcgaaact

SEQ ID NO: 243 - RNA, 21 nt, synthetic construct
  source 1..21: mol_type = other RNA
aagcacataaaggcgaaactg

SEQ ID NO: 244 - RNA, 21 nt, synthetic construct
  source 1..21: mol_type = other RNA
gcacataaaggcgaaactgag

SEQ ID NO: 245 - RNA, 21 nt, synthetic construct
  source 1..21: mol_type = other RNA
gattccaagtccatgtgaggg

SEQ ID NO: 246 - RNA, 21 nt, synthetic construct
  source 1..21: mol_type = other RNA
attccaagtccatgtgagggg

SEQ ID NO: 247 - RNA, 21 nt, synthetic construct
  source 1..21: mol_type = other RNA
ccaagtccatgtgaggggcat

SEQ ID NO: 248 - RNA, 21 nt, synthetic construct
  source 1..21: mol_type = other RNA
caagtccatgtgaggggcatg

SEQ ID NO: 249 - RNA, 21 nt, synthetic construct
  source 1..21: mol_type = other RNA
gtccatgtgaggggcatggcc

SEQ ID NO: 250 - RNA, 21 nt, synthetic construct
  source 1..21: mol_type = other RNA
gcagctgcggtgagagtttac

SEQ ID NO: 251 - RNA, 21 nt, synthetic construct
  source 1..21: mol_type = other RNA
agctgcggtgagagtttactg

SEQ ID NO: 252 - RNA, 21 nt, synthetic construct
  source 1..21: mol_type = other RNA
cccagagaaagtgcagctctg

SEQ ID NO: 253 - RNA, 21 nt, synthetic construct
  source 1..21: mol_type = other RNA
caaagcatgcagcccttctgc

SEQ ID NO: 254 - RNA, 21 nt, synthetic construct
  source 1..21: mol_type = other RNA
ccttctgcctctagaccattt

SEQ ID NO: 255 - RNA, 21 nt, synthetic construct
  source 1..21: mol_type = other RNA
tctgcctctagaccatttggc

SEQ ID NO: 256 - RNA, 21 nt, synthetic construct
  source 1..21: mol_type = other RNA
tctagaccatttggcatcggc

SEQ ID NO: 257 - RNA, 21 nt, synthetic construct
  source 1..21: mol_type = other RNA
ctagaccatttggcatcggct

SEQ ID NO: 258 - RNA, 21 nt, synthetic construct
  source 1..21: mol_type = other RNA
tagaccatttggcatcggctc

SEQ ID NO: 259 - RNA, 21 nt, synthetic construct
  source 1..21: mol_type = other RNA
agaccatttggcatcggctcc

SEQ ID NO: 260 - RNA, 21 nt, synthetic construct
  source 1..21: mol_type = other RNA
tttggcatcggctcctgtttc

SEQ ID NO: 261 - RNA, 21 nt, synthetic construct
  source 1..21: mol_type = other RNA
ggcatcggctcctgtttccat

SEQ ID NO: 262 - RNA, 21 nt, synthetic construct
  source 1..21: mol_type = other RNA
tcggctcctgtttccattgcc

SEQ ID NO: 263 - RNA, 21 nt, synthetic construct
  source 1..21: mol_type = other RNA
ggctcctgtttccattgcctg

SEQ ID NO: 264 - RNA, 21 nt, synthetic construct
  source 1..21: mol_type = other RNA
taggcattttgtaattggaaa

SEQ ID NO: 265 - RNA, 21 nt, synthetic construct
  source 1..21: mol_type = other RNA
aggcattttgtaattggaaag

SEQ ID NO: 266 - RNA, 21 nt, synthetic construct
  source 1..21: mol_type = other RNA
attttgtaattggaaagtcaa

SEQ ID NO: 267 - RNA, 21 nt, synthetic construct
  source 1..21: mol_type = other RNA
tttgtaattggaaagtcaaga

SEQ ID NO: 268 - RNA, 21 nt, synthetic construct
  source 1..21: mol_type = other RNA
aattggaaagtcaagactgca

SEQ ID NO: 269 - RNA, 21 nt, synthetic construct
  source 1..21: mol_type = other RNA
ggaaagtcaagactgcagtat

SEQ ID NO: 270 - RNA, 21 nt, synthetic construct
  source 1..21: mol_type = other RNA
gtcaagactgcagtatgtgca

SEQ ID NO: 271 - RNA, 21 nt, synthetic construct
  source 1..21: mol_type = other RNA
tcaagactgcagtatgtgcac

SEQ ID NO: 272 - RNA, 21 nt, synthetic construct
  source 1..21: mol_type = other RNA
acacacacagtagtggagctt

SEQ ID NO: 273 - RNA, 21 nt, synthetic construct
  source 1..21: mol_type = other RNA
cacacagtagtggagctttcc

SEQ ID NO: 274 - RNA, 21 nt, synthetic construct
  source 1..21: mol_type = other RNA
acacagtagtggagctttcct

SEQ ID NO: 275 - RNA, 21 nt, synthetic construct
  source 1..21: mol_type = other RNA
acagtagtggagctttcctaa

SEQ ID NO: 276 - RNA, 21 nt, synthetic construct
  source 1..21: mol_type = other RNA
gctttcctaacactagcagag

SEQ ID NO: 277 - RNA, 21 nt, synthetic construct
  source 1..21: mol_type = other RNA
taacactagcagagattaatc

SEQ ID NO: 278 - RNA, 21 nt, synthetic construct
  source 1..21: mol_type = other RNA
aacactagcagagattaatca

SEQ ID NO: 279 - RNA, 21 nt, synthetic construct
  source 1..21: mol_type = other RNA
acactagcagagattaatcac

SEQ ID NO: 280 - RNA, 21 nt, synthetic construct
  source 1..21: mol_type = other RNA
ctagcagagattaatcactac

SEQ ID NO: 281 - RNA, 21 nt, synthetic construct
  source 1..21: mol_type = other RNA
agagattaatcactacattag

SEQ ID NO: 282 - RNA, 21 nt, synthetic construct
  source 1..21: mol_type = other RNA
ctacattagacaacactcatc

SEQ ID NO: 283 - RNA, 21 nt, synthetic construct
  source 1..21: mol_type = other RNA
tacattagacaacactcatct

SEQ ID NO: 284 - RNA, 21 nt, synthetic construct
  source 1..21: mol_type = other RNA
cattagacaacactcatctac

SEQ ID NO: 285 - RNA, 21 nt, synthetic construct
  source 1..21: mol_type = other RNA
ggataactgagaaacaagaga

SEQ ID NO: 286 - RNA, 21 nt, synthetic construct
  source 1..21: mol_type = other RNA
gagaccattctctgtctaact

SEQ ID NO: 287 - RNA, 21 nt, synthetic construct
  source 1..21: mol_type = other RNA
ctgtctaactgtgataaaaac

SEQ ID NO: 288 - RNA, 21 nt, synthetic construct
  source 1..21: mol_type = other RNA
tcaggactttattctatagag

SEQ ID NO: 289 - RNA, 21 nt, synthetic construct
  source 1..21: mol_type = other RNA
actttattctatagagcaaac

SEQ ID NO: 290 - RNA, 21 nt, synthetic construct
  source 1..21: mol_type = other RNA
ttattctatagagcaaacttg

SEQ ID NO: 291 - RNA, 21 nt, synthetic construct
  source 1..21: mol_type = other RNA
tattctatagagcaaacttgc

SEQ ID NO: 292 - RNA, 21 nt, synthetic construct
  source 1..21: mol_type = other RNA
ttctatagagcaaacttgctg

SEQ ID NO: 293 - RNA, 21 nt, synthetic construct
  source 1..21: mol_type = other RNA
ctgtggagggccatgctctcc

SEQ ID NO: 294 - RNA, 21 nt, synthetic construct
  source 1..21: mol_type = other RNA
gctctccttggacccagttaa

SEQ ID NO: 295 - RNA, 21 nt, synthetic construct
  source 1..21: mol_type = other RNA
tctccttggacccagttaact

SEQ ID NO: 296 - RNA, 21 nt, synthetic construct
  source 1..21: mol_type = other RNA
ctccttggacccagttaactg

SEQ ID NO: 297 - RNA, 21 nt, synthetic construct
  source 1..21: mol_type = other RNA
ccttggacccagttaactgca

SEQ ID NO: 298 - RNA, 21 nt, synthetic construct
  source 1..21: mol_type = other RNA
cttggacccagttaactgcaa

SEQ ID NO: 299 - RNA, 21 nt, synthetic construct
  source 1..21: mol_type = other RNA
ggacccagttaactgcaaacg

SEQ ID NO: 300 - RNA, 21 nt, synthetic construct
  source 1..21: mol_type = other RNA
gacccagttaactgcaaacgt

SEQ ID NO: 301 - RNA, 21 nt, synthetic construct
  source 1..21: mol_type = other RNA
acccagttaactgcaaacgtg

SEQ ID NO: 302 - RNA, 21 nt, synthetic construct
  source 1..21: mol_type = other RNA
cccagttaactgcaaacgtgc

SEQ ID NO: 303 - RNA, 21 nt, synthetic construct
  source 1..21: mol_type = other RNA
ccagttaactgcaaacgtgca

SEQ ID NO: 304 - RNA, 21 nt, synthetic construct
  source 1..21: mol_type = other RNA
cagttaactgcaaacgtgcat

SEQ ID NO: 305 - RNA, 21 nt, synthetic construct
  source 1..21: mol_type = other RNA
ttaactgcaaacgtgcattgg

SEQ ID NO: 306 - RNA, 21 nt, synthetic construct
  source 1..21: mol_type = other RNA
ctgcaaacgtgcattggagcc

SEQ ID NO: 307 - RNA, 21 nt, synthetic construct
  source 1..21: mol_type = other RNA
tgcaaacgtgcattggagccc

SEQ ID NO: 308 - RNA, 21 nt, synthetic construct
  source 1..21: mol_type = other RNA
aacgtgcattggagccctatt

SEQ ID NO: 309 - RNA, 21 nt, synthetic construct
  source 1..21: mol_type = other RNA
acgtgcattggagccctattt

SEQ ID NO: 310 - RNA, 21 nt, synthetic construct
  source 1..21: mol_type = other RNA
gtgcattggagccctatttgc

SEQ ID NO: 311 - RNA, 21 nt, synthetic construct
  source 1..21: mol_type = other RNA
tgcattggagccctatttgct

SEQ ID NO: 312 - RNA, 21 nt, synthetic construct
  source 1..21: mol_type = other RNA
tggagccctatttgctgccgc

SEQ ID NO: 313 - RNA, 21 nt, synthetic construct
  source 1..21: mol_type = other RNA
ggagccctatttgctgccgct

SEQ ID NO: 314 - RNA, 21 nt, synthetic construct
  source 1..21: mol_type = other RNA
gagccctatttgctgccgctg

SEQ ID NO: 315 - RNA, 21 nt, synthetic construct
  source 1..21: mol_type = other RNA
agccctatttgctgccgctgc

SEQ ID NO: 316 - RNA, 21 nt, synthetic construct
  source 1..21: mol_type = other RNA
ccgctgccattctagtgacct

SEQ ID NO: 317 - RNA, 21 nt, synthetic construct
  source 1..21: mol_type = other RNA
tgccattctagtgacctttcc

SEQ ID NO: 318 - RNA, 21 nt, synthetic construct
  source 1..21: mol_type = other RNA
gccattctagtgacctttcca

SEQ ID NO: 319 - RNA, 21 nt, synthetic construct
  source 1..21: mol_type = other RNA
ctagtgacctttccacagagc

SEQ ID NO: 320 - RNA, 21 nt, synthetic construct
  source 1..21: mol_type = other RNA
agagctgcgccttcctcacgt

SEQ ID NO: 321 - RNA, 21 nt, synthetic construct
  source 1..21: mol_type = other RNA
gcgccttcctcacgtgtgtga

SEQ ID NO: 322 - RNA, 21 nt, synthetic construct
  source 1..21: mol_type = other RNA
cctcacgtgtgtgaaaggttt

SEQ ID NO: 323 - RNA, 21 nt, synthetic construct
  source 1..21: mol_type = other RNA
ctcacgtgtgtgaaaggtttt

SEQ ID NO: 324 - RNA, 21 nt, synthetic construct
  source 1..21: mol_type = other RNA
ttcagccctcaggtagatgga

SEQ ID NO: 325 - RNA, 21 nt, synthetic construct
  source 1..21: mol_type = other RNA
tcagccctcaggtagatggaa

SEQ ID NO: 326 - RNA, 21 nt, synthetic construct
  source 1..21: mol_type = other RNA
agccctcaggtagatggaagc

SEQ ID NO: 327 - RNA, 21 nt, synthetic construct
  source 1..21: mol_type = other RNA
cacgatggcagtgcagtcatc

SEQ ID NO: 328 - RNA, 21 nt, synthetic construct
  source 1..21: mol_type = other RNA
tcaggatgtttcttcaggact

SEQ ID NO: 329 - RNA, 21 nt, synthetic construct
  source 1..21: mol_type = other RNA
ttcctcagctgacaaggaatt

SEQ ID NO: 330 - RNA, 21 nt, synthetic construct
  source 1..21: mol_type = other RNA
agctgacaaggaattttggtc

SEQ ID NO: 331 - RNA, 21 nt, synthetic construct
  source 1..21: mol_type = other RNA
gaattttggtccctgcctagg

SEQ ID NO: 332 - RNA, 21 nt, synthetic construct
  source 1..21: mol_type = other RNA
aattttggtccctgcctagga

SEQ ID NO: 333 - RNA, 21 nt, synthetic construct
  source 1..21: mol_type = other RNA
ttttggtccctgcctaggacc

SEQ ID NO: 334 - RNA, 21 nt, synthetic construct
  source 1..21: mol_type = other RNA
tttggtccctgcctaggaccg

SEQ ID NO: 335 - RNA, 21 nt, synthetic construct
  source 1..21: mol_type = other RNA
ctgcctaggaccgggtcatct

SEQ ID NO: 336 - RNA, 21 nt, synthetic construct
  source 1..21: mol_type = other RNA
acagagagatggtaagcagct

SEQ ID NO: 337 - RNA, 21 nt, synthetic construct
  source 1..21: mol_type = other RNA
gagagatggtaagcagctgta

SEQ ID NO: 338 - RNA, 21 nt, synthetic construct
  source 1..21: mol_type = other RNA
agagatggtaagcagctgtat

SEQ ID NO: 339 - RNA, 21 nt, synthetic construct
  source 1..21: mol_type = other RNA
gagatggtaagcagctgtatg

SEQ ID NO: 340 - RNA, 21 nt, synthetic construct
  source 1..21: mol_type = other RNA
gtaagcagctgtatgaatgct

SEQ ID NO: 341 - RNA, 21 nt, synthetic construct
  source 1..21: mol_type = other RNA
agcagctgtatgaatgctgat

SEQ ID NO: 342 - RNA, 21 nt, synthetic construct
  source 1..21: mol_type = other RNA
gattttaaaaccaggtcatgg

SEQ ID NO: 343 - RNA, 21 nt, synthetic construct
  source 1..21: mol_type = other RNA
ttttaaaaccaggtcatggga

SEQ ID NO: 344 - RNA, 21 nt, synthetic construct
  source 1..21: mol_type = other RNA
ctgaacactgactgcacttac

SEQ ID NO: 345 - RNA, 21 nt, synthetic construct
  source 1..21: mol_type = other RNA
tgaacactgactgcacttacc

SEQ ID NO: 346 - RNA, 21 nt, synthetic construct
  source 1..21: mol_type = other RNA
cacttaccagtctgattttat

SEQ ID NO: 347 - RNA, 21 nt, synthetic construct
  source 1..21: mol_type = other RNA
accagtctgattttatcgtca

SEQ ID NO: 348 - RNA, 21 nt, synthetic construct
  source 1..21: mol_type = other RNA
ccagtctgattttatcgtcaa

SEQ ID NO: 349 - RNA, 21 nt, synthetic construct
  source 1..21: mol_type = other RNA
tctgattttatcgtcaaacac

SEQ ID NO: 350 - RNA, 21 nt, synthetic construct
  source 1..21: mol_type = other RNA
ctgattttatcgtcaaacacc

SEQ ID NO: 351 - RNA, 21 nt, synthetic construct
  source 1..21: mol_type = other RNA
tgattttatcgtcaaacacca

SEQ ID NO: 352 - RNA, 21 nt, synthetic construct
  source 1..21: mol_type = other RNA
gattttatcgtcaaacaccaa

SEQ ID NO: 353 - RNA, 21 nt, synthetic construct
  source 1..21: mol_type = other RNA
attttatcgtcaaacaccaag

SEQ ID NO: 354 - RNA, 21 nt, synthetic construct
  source 1..21: mol_type = other RNA
ttatcgtcaaacaccaagcca

SEQ ID NO: 355 - RNA, 21 nt, synthetic construct
  source 1..21: mol_type = other RNA
tatcgtcaaacaccaagccag

SEQ ID NO: 356 - RNA, 21 nt, synthetic construct
  source 1..21: mol_type = other RNA
catgctcatggcaatctgttt

SEQ ID NO: 357 - RNA, 21 nt, synthetic construct
  source 1..21: mol_type = other RNA
tcatggcaatctgtttggggc

SEQ ID NO: 358 - RNA, 21 nt, synthetic construct
  source 1..21: mol_type = other RNA
gttttgttgtggcactagcca

SEQ ID NO: 359 - RNA, 21 nt, synthetic construct
  source 1..21: mol_type = other RNA
ttttgttgtggcactagccaa

SEQ ID NO: 360 - RNA, 21 nt, synthetic construct
  source 1..21: mol_type = other RNA
tttgttgtggcactagccaaa

SEQ ID NO: 361 - RNA, 21 nt, synthetic construct
  source 1..21: mol_type = other RNA
ttgttgtggcactagccaaac

SEQ ID NO: 362 - RNA, 21 nt, synthetic construct
  source 1..21: mol_type = other RNA
gttgtggcactagccaaacat

SEQ ID NO: 363 - RNA, 21 nt, synthetic construct
  source 1..21: mol_type = other RNA
ttgtggcactagccaaacata

SEQ ID NO: 364 - RNA, 21 nt, synthetic construct
  source 1..21: mol_type = other RNA
tgtggcactagccaaacataa

SEQ ID NO: 365 - RNA, 21 nt, synthetic construct
  source 1..21: mol_type = other RNA
gtggcactagccaaacataaa

SEQ ID NO: 366 - RNA, 21 nt, synthetic construct
  source 1..21: mol_type = other RNA
tggcactagccaaacataaag

SEQ ID NO: 367 - RNA, 21 nt, synthetic construct
  source 1..21: mol_type = other RNA
ggcactagccaaacataaagg

SEQ ID NO: 368 - RNA, 21 nt, synthetic construct
  source 1..21: mol_type = other RNA
gcactagccaaacataaaggg

SEQ ID NO: 369 - RNA, 21 nt, synthetic construct
  source 1..21: mol_type = other RNA
agccaaacataaaggggctta

SEQ ID NO: 370 - RNA, 21 nt, synthetic construct
  source 1..21: mol_type = other RNA
gccaaacataaaggggcttaa

SEQ ID NO: 371 - RNA, 21 nt, synthetic construct
  source 1..21: mol_type = other RNA
ccaaacataaaggggcttaag

SEQ ID NO: 372 - RNA, 21 nt, synthetic construct
  source 1..21: mol_type = other RNA
caaacataaaggggcttaagt

SEQ ID NO: 373 - RNA, 21 nt, synthetic construct
  source 1..21: mol_type = other RNA
aaacataaaggggcttaagtc

SEQ ID NO: 374 - RNA, 21 nt, synthetic construct
  source 1..21: mol_type = other RNA
aacataaaggggcttaagtca

SEQ ID NO: 375 - RNA, 21 nt, synthetic construct
  source 1..21: mol_type = other RNA
acataaaggggcttaagtcag

SEQ ID NO: 376 - RNA, 21 nt, synthetic construct
  source 1..21: mol_type = other RNA
ataaaggggcttaagtcagcc

SEQ ID NO: 377 - RNA, 21 nt, synthetic construct
  source 1..21: mol_type = other RNA
taaaggggcttaagtcagcct

SEQ ID NO: 378 - RNA, 21 nt, synthetic construct
  source 1..21: mol_type = other RNA
aggggcttaagtcagcctgca

SEQ ID NO: 379 - RNA, 21 nt, synthetic construct
  source 1..21: mol_type = other RNA
aagtcagcctgcatacagagg

SEQ ID NO: 380 - RNA, 21 nt, synthetic construct
  source 1..21: mol_type = other RNA
agtcagcctgcatacagagga

SEQ ID NO: 381 - RNA, 21 nt, synthetic construct
  source 1..21: mol_type = other RNA
agcctgcatacagaggatcgg

SEQ ID NO: 382 - RNA, 21 nt, synthetic construct
  source 1..21: mol_type = other RNA
gcctgcatacagaggatcggg

SEQ ID NO: 383 - RNA, 21 nt, synthetic construct
  source 1..21: mol_type = other RNA
cctgcatacagaggatcgggg

SEQ ID NO: 384 - RNA, 21 nt, synthetic construct
  source 1..21: mol_type = other RNA
acagaggatcggggagagaag

SEQ ID NO: 385 - RNA, 21 nt, synthetic construct
  source 1..21: mol_type = other RNA
gagtacttaccagagtttaat

SEQ ID NO: 386 - RNA, 21 nt, synthetic construct
  source 1..21: mol_type = other RNA
ctgcactaaaatccccaaact

SEQ ID NO: 387 - RNA, 21 nt, synthetic construct
  source 1..21: mol_type = other RNA
tgcactaaaatccccaaactg

SEQ ID NO: 388 - RNA, 21 nt, synthetic construct
  source 1..21: mol_type = other RNA
cactaaaatccccaaactgac

SEQ ID NO: 389 - RNA, 21 nt, synthetic construct
  source 1..21: mol_type = other RNA
aatccccaaactgacaggtaa

SEQ ID NO: 390 - RNA, 21 nt, synthetic construct
  source 1..21: mol_type = other RNA
ccaaactgacaggtaaatgta

SEQ ID NO: 391 - RNA, 21 nt, synthetic construct
  source 1..21: mol_type = other RNA
caaactgacaggtaaatgtag

SEQ ID NO: 392 - RNA, 21 nt, synthetic construct
  source 1..21: mol_type = other RNA
aaactgacaggtaaatgtagc

SEQ ID NO: 393 - RNA, 21 nt, synthetic construct
  source 1..21: mol_type = other RNA
actgacaggtaaatgtagccc

SEQ ID NO: 394 - RNA, 21 nt, synthetic construct
  source 1..21: mol_type = other RNA
atctaaatcacactattttcg

SEQ ID NO: 395 - RNA, 21 nt, synthetic construct
  source 1..21: mol_type = other RNA
ctaaatcacactattttcgag

SEQ ID NO: 396 - RNA, 21 nt, synthetic construct
  source 1..21: mol_type = other RNA
taaatcacactattttcgaga

SEQ ID NO: 397 - RNA, 21 nt, synthetic construct
  source 1..21: mol_type = other RNA
aatcacactattttcgagatc

SEQ ID NO: 398 - RNA, 21 nt, synthetic construct
  source 1..21: mol_type = other RNA
tcacactattttcgagatcat

SEQ ID NO: 399 - RNA, 21 nt, synthetic construct
  source 1..21: mol_type = other RNA
cacactattttcgagatcatg

SEQ ID NO: 400 - RNA, 21 nt, synthetic construct
  source 1..21: mol_type = other RNA
acactattttcgagatcatgt

SEQ ID NO: 401 - RNA, 21 nt, synthetic construct
  source 1..21: mol_type = other RNA
actattttcgagatcatgtat

SEQ ID NO: 402 - RNA, 21 nt, synthetic construct
  source 1..21: mol_type = other RNA
ctattttcgagatcatgtata

SEQ ID NO: 403 - RNA, 21 nt, synthetic construct
  source 1..21: mol_type = other RNA
attttcgagatcatgtataaa

SEQ ID NO: 404 - RNA, 21 nt, synthetic construct
  source 1..21: mol_type = other RNA
ttcgagatcatgtataaaaag

SEQ ID NO: 405 - RNA, 21 nt, synthetic construct
  source 1..21: mol_type = other RNA
aaaaaagaagtcatgctgtgt

SEQ ID NO: 406 - RNA, 21 nt, synthetic construct
  source 1..21: mol_type = other RNA
tgctgtgtggccaattataat

SEQ ID NO: 407 - RNA, 21 nt, synthetic construct
  source 1..21: mol_type = other RNA
ttggagggaccaggaaatgta

SEQ ID NO: 408 - RNA, 21 nt, synthetic construct
  source 1..21: mol_type = other RNA
accaggaaatgtaagacacca

SEQ ID NO: 409 - RNA, 21 nt, synthetic construct
  source 1..21: mol_type = other RNA
ccaggaaatgtaagacaccaa

SEQ ID NO: 410 - RNA, 21 nt, synthetic construct
  source 1..21: mol_type = other RNA
gtgtgcctgatgtcacctcat

SEQ ID NO: 411 - RNA, 21 nt, synthetic construct
  source 1..21: mol_type = other RNA
tgtgcctgatgtcacctcatg

SEQ ID NO: 412 - RNA, 21 nt, synthetic construct
  source 1..21: mol_type = other RNA
gtgcctgatgtcacctcatga

SEQ ID NO: 413 - RNA, 21 nt, synthetic construct
  source 1..21: mol_type = other RNA
gcctgatgtcacctcatgatt

SEQ ID NO: 414 - RNA, 21 nt, synthetic construct
  source 1..21: mol_type = other RNA
ttttttaactcctgcgccaag

SEQ ID NO: 415 - RNA, 21 nt, synthetic construct
  source 1..21: mol_type = other RNA
ttaactcctgcgccaaggaca

SEQ ID NO: 416 - RNA, 21 nt, synthetic construct
  source 1..21: mol_type = other RNA
aactcctgcgccaaggacagt

SEQ ID NO: 417 - RNA, 21 nt, synthetic construct
  source 1..21: mol_type = other RNA
actcctgcgccaaggacagtg

SEQ ID NO: 418 - RNA, 21 nt, synthetic construct
  source 1..21: mol_type = other RNA
tgtccacctttgtgctttgcg

SEQ ID NO: 419 - RNA, 21 nt, synthetic construct
  source 1..21: mol_type = other RNA
tccacctttgtgctttgcgag

SEQ ID NO: 420 - RNA, 21 nt, synthetic construct
  source 1..21: mol_type = other RNA
cacctttgtgctttgcgaggc

SEQ ID NO: 421 - RNA, 21 nt, synthetic construct
  source 1..21: mol_type = other RNA
cctttgtgctttgcgaggccg

SEQ ID NO: 422 - RNA, 21 nt, synthetic construct
  source 1..21: mol_type = other RNA
gagcccaggcatctgctcgcc

SEQ ID NO: 423 - RNA, 21 nt, synthetic construct
  source 1..21: mol_type = other RNA
cccaggcatctgctcgcctgc

SEQ ID NO: 424 - RNA, 21 nt, synthetic construct
  source 1..21: mol_type = other RNA
caggcatctgctcgcctgcca

SEQ ID NO: 425 - RNA, 21 nt, synthetic construct
  source 1..21: mol_type = other RNA
gcatctgctcgcctgccacgg

SEQ ID NO: 426 - RNA, 21 nt, synthetic construct
  source 1..21: mol_type = other RNA
tgccacggctgaccagagaag

SEQ ID NO: 427 - RNA, 21 nt, synthetic construct
  source 1..21: mol_type = other RNA
gagctctgccttagacgacgt

SEQ ID NO: 428 - RNA, 21 nt, synthetic construct
  source 1..21: mol_type = other RNA
agctctgccttagacgacgtg

SEQ ID NO: 429 - RNA, 21 nt, synthetic construct
  source 1..21: mol_type = other RNA
gctctgccttagacgacgtgt

SEQ ID NO: 430 - RNA, 21 nt, synthetic construct
  source 1..21: mol_type = other RNA
ctctgccttagacgacgtgtt

SEQ ID NO: 431 - RNA, 21 nt, synthetic construct
  source 1..21: mol_type = other RNA
tctgccttagacgacgtgtta

SEQ ID NO: 432 - RNA, 21 nt, synthetic construct
  source 1..21: mol_type = other RNA
ctgccttagacgacgtgttac

SEQ ID NO: 433 - RNA, 21 nt, synthetic construct
  source 1..21: mol_type = other RNA
gccttagacgacgtgttacag

SEQ ID NO: 434 - RNA, 21 nt, synthetic construct
  source 1..21: mol_type = other RNA
ccttagacgacgtgttacagt

SEQ ID NO: 435 - RNA, 21 nt, synthetic construct
  source 1..21: mol_type = other RNA
cttagacgacgtgttacagta

SEQ ID NO: 436 - RNA, 21 nt, synthetic construct
  source 1..21: mol_type = other RNA
tagacgacgtgttacagtatg

SEQ ID NO: 437 - RNA, 21 nt, synthetic construct
  source 1..21: mol_type = other RNA
acgacgtgttacagtatgaac

SEQ ID NO: 438 - RNA, 21 nt, synthetic construct
  source 1..21: mol_type = other RNA
acacagcagaggcaccctcgt

SEQ ID NO: 439 - RNA, 21 nt, synthetic construct
  source 1..21: mol_type = other RNA
cacagcagaggcaccctcgta

SEQ ID NO: 440 - RNA, 21 nt, synthetic construct
  source 1..21: mol_type = other RNA
acagcagaggcaccctcgtat

SEQ ID NO: 441 - RNA, 21 nt, synthetic construct
  source 1..21: mol_type = other RNA
cagcagaggcaccctcgtatg

SEQ ID NO: 442 - RNA, 21 nt, synthetic construct
  source 1..21: mol_type = other RNA
agcagaggcaccctcgtatgt

SEQ ID NO: 443 - RNA, 21 nt, synthetic construct
  source 1..21: mol_type = other RNA
gcagaggcaccctcgtatgtt

SEQ ID NO: 444 - RNA, 21 nt, synthetic construct
  source 1..21: mol_type = other RNA
cagaggcaccctcgtatgttt

SEQ ID NO: 445 - RNA, 21 nt, synthetic construct
  source 1..21: mol_type = other RNA
agaggcaccctcgtatgtttt

SEQ ID NO: 446 - RNA, 21 nt, synthetic construct
  source 1..21: mol_type = other RNA
gaggcaccctcgtatgttttg

SEQ ID NO: 447 - RNA, 21 nt, synthetic construct
  source 1..21: mol_type = other RNA
ggcaccctcgtatgttttgaa

SEQ ID NO: 448 - RNA, 21 nt, synthetic construct
  source 1..21: mol_type = other RNA
ccctcgtatgttttgaaagtt

SEQ ID NO: 449 - RNA, 21 nt, synthetic construct
  source 1..21: mol_type = other RNA
atgtaaaactatactgacccg

SEQ ID NO: 450 - RNA, 21 nt, synthetic construct
  source 1..21: mol_type = other RNA
tgtaaaactatactgacccgt

SEQ ID NO: 451 - RNA, 21 nt, synthetic construct
  source 1..21: mol_type = other RNA
gtaaaactatactgacccgtt

SEQ ID NO: 452 - RNA, 21 nt, synthetic construct
  source 1..21: mol_type = other RNA
taaaactatactgacccgttt

SEQ ID NO: 453 - RNA, 21 nt, synthetic construct
  source 1..21: mol_type = other RNA
actatactgacccgttttcag

SEQ ID NO: 454 - RNA, 21 nt, synthetic construct
  source 1..21: mol_type = other RNA
atactgacccgttttcagttt

SEQ ID NO: 455 - RNA, 21 nt, synthetic construct
  source 1..21: mol_type = other RNA
tttcagttttaaagggtcgtg

SEQ ID NO: 456 - RNA, 21 nt, synthetic construct
  source 1..21: mol_type = other RNA
ttcagttttaaagggtcgtga

SEQ ID NO: 457 - RNA, 21 nt, synthetic construct
  source 1..21: mol_type = other RNA
tcagttttaaagggtcgtgag

SEQ ID NO: 458 - RNA, 21 nt, synthetic construct
  source 1..21: mol_type = other RNA
cagttttaaagggtcgtgaga

SEQ ID NO: 459 - RNA, 21 nt, synthetic construct
  source 1..21: mol_type = other RNA
gttttaaagggtcgtgagaaa

SEQ ID NO: 460 - RNA, 21 nt, synthetic construct
  source 1..21: mol_type = other RNA
ttttaaagggtcgtgagaaac

SEQ ID NO: 461 - RNA, 21 nt, synthetic construct
  source 1..21: mol_type = other RNA
tttaaagggtcgtgagaaact

SEQ ID NO: 462 - RNA, 21 nt, synthetic construct
  source 1..21: mol_type = other RNA
taaagggtcgtgagaaactgg

SEQ ID NO: 463 - RNA, 21 nt, synthetic construct
  source 1..21: mol_type = other RNA
aaagggtcgtgagaaactggc

SEQ ID NO: 464 - RNA, 21 nt, synthetic construct
  source 1..21: mol_type = other RNA
gagaaactggctggtccaatg

SEQ ID NO: 465 - RNA, 21 nt, synthetic construct
  source 1..21: mol_type = other RNA
tggtccaatgggatttacagc

SEQ ID NO: 466 - RNA, 21 nt, synthetic construct
  source 1..21: mol_type = other RNA
ccaatgggatttacagcaaca

SEQ ID NO: 467 - RNA, 21 nt, synthetic construct
  source 1..21: mol_type = other RNA
tttaagtttgctcttaatcgt

SEQ ID NO: 468 - RNA, 21 nt, synthetic construct
  source 1..21: mol_type = other RNA
ttaagtttgctcttaatcgta

SEQ ID NO: 469 - RNA, 21 nt, synthetic construct
  source 1..21: mol_type = other RNA
agtttgctcttaatcgtatgg

SEQ ID NO: 470 - RNA, 21 nt, synthetic construct
  source 1..21: mol_type = other RNA
gtttgctcttaatcgtatgga

SEQ ID NO: 471 - RNA, 21 nt, synthetic construct
  source 1..21: mol_type = other RNA
tttgctcttaatcgtatggaa

SEQ ID NO: 472 - RNA, 21 nt, synthetic construct
  source 1..21: mol_type = other RNA
tgctcttaatcgtatggaagc

SEQ ID NO: 473 - RNA, 21 nt, synthetic construct
  source 1..21: mol_type = other RNA
cttaatcgtatggaagcttga

SEQ ID NO: 474 - RNA, 21 nt, synthetic construct
  source 1..21: mol_type = other RNA
ttaatcgtatggaagcttgag

SEQ ID NO: 475 - RNA, 21 nt, synthetic construct
  source 1..21: mol_type = other RNA
ggaagcttgagctatgtgttg

SEQ ID NO: 476 - RNA, 21 nt, synthetic construct
  source 1..21: mol_type = other RNA
gaagcttgagctatgtgttgg

SEQ ID NO: 477 - RNA, 21 nt, synthetic construct
  source 1..21: mol_type = other RNA
agcttgagctatgtgttggaa

SEQ ID NO: 478 - RNA, 21 nt, synthetic construct
  source 1..21: mol_type = other RNA
gcttgagctatgtgttggaag

SEQ ID NO: 479 - RNA, 21 nt, synthetic construct
  source 1..21: mol_type = other RNA
cttgagctatgtgttggaagt

SEQ ID NO: 480 - RNA, 21 nt, synthetic construct
  source 1..21: mol_type = other RNA
ttgagctatgtgttggaagtg

SEQ ID NO: 481 - RNA, 21 nt, synthetic construct
  source 1..21: mol_type = other RNA
tgagctatgtgttggaagtgc

SEQ ID NO: 482 - RNA, 21 nt, synthetic construct
  source 1..21: mol_type = other RNA
gagctatgtgttggaagtgcc

SEQ ID NO: 483 - RNA, 21 nt, synthetic construct
  source 1..21: mol_type = other RNA
gtgttggaagtgccctggttt

SEQ ID NO: 484 - RNA, 21 nt, synthetic construct
  source 1..21: mol_type = other RNA
ggaagtgccctggttttaatc

SEQ ID NO: 485 - RNA, 21 nt, synthetic construct
  source 1..21: mol_type = other RNA
ctggttttaatccatacacaa

SEQ ID NO: 486 - RNA, 21 nt, synthetic construct
  source 1..21: mol_type = other RNA
ttaatccatacacaaagacgg

SEQ ID NO: 487 - RNA, 21 nt, synthetic construct
  source 1..21: mol_type = other RNA
taatccatacacaaagacggt

SEQ ID NO: 488 - RNA, 21 nt, synthetic construct
  source 1..21: mol_type = other RNA
aatccatacacaaagacggta

SEQ ID NO: 489 - RNA, 21 nt, synthetic construct
  source 1..21: mol_type = other RNA
atccatacacaaagacggtac

SEQ ID NO: 490 - RNA, 21 nt, synthetic construct
  source 1..21: mol_type = other RNA
tccatacacaaagacggtaca

SEQ ID NO: 491 - RNA, 21 nt, synthetic construct
  source 1..21: mol_type = other RNA
catacacaaagacggtacata

SEQ ID NO: 492 - RNA, 21 nt, synthetic construct
  source 1..21: mol_type = other RNA
tacacaaagacggtacataat

SEQ ID NO: 493 - RNA, 21 nt, synthetic construct
  source 1..21: mol_type = other RNA
acacaaagacggtacataatc

SEQ ID NO: 494 - RNA, 21 nt, synthetic construct
  source 1..21: mol_type = other RNA
cacaaagacggtacataatcc

SEQ ID NO: 495 - RNA, 21 nt, synthetic construct
  source 1..21: mol_type = other RNA
acaaagacggtacataatcct

SEQ ID NO: 496 - RNA, 21 nt, synthetic construct
  source 1..21: mol_type = other RNA
caaagacggtacataatccta

SEQ ID NO: 497 - RNA, 21 nt, synthetic construct
  source 1..21: mol_type = other RNA
aaagacggtacataatcctac

SEQ ID NO: 498 - RNA, 21 nt, synthetic construct
  source 1..21: mol_type = other RNA
aagacggtacataatcctaca

SEQ ID NO: 499 - RNA, 21 nt, synthetic construct
  source 1..21: mol_type = other RNA
gtacataatcctacaggttta

SEQ ID NO: 500 - RNA, 21 nt, synthetic construct
  source 1..21: mol_type = other RNA
cataatcctacaggtttaaat

SEQ ID NO: 501 - RNA, 21 nt, synthetic construct
  source 1..21: mol_type = other RNA
atcctacaggtttaaatgtac

SEQ ID NO: 502 - RNA, 21 nt, synthetic construct
  source 1..21: mol_type = other RNA
tagtttggaattctttgctct

SEQ ID NO: 503 - RNA, 21 nt, synthetic construct
  source 1..21: mol_type = other RNA
agtttggaattctttgctcta

SEQ ID NO: 504 - RNA, 21 nt, synthetic construct
  source 1..21: mol_type = other RNA
tttggaattctttgctctact

SEQ ID NO: 505 - RNA, 21 nt, synthetic construct
  source 1..21: mol_type = other RNA
ttgctctactgtttacattgc

SEQ ID NO: 506 - RNA, 21 nt, synthetic construct
  source 1..21: mol_type = other RNA
tctactgtttacattgcagat

SEQ ID NO: 507 - RNA, 21 nt, synthetic construct
  source 1..21: mol_type = other RNA
tactgtttacattgcagattg

SEQ ID NO: 508 - RNA, 21 nt, synthetic construct
  source 1..21: mol_type = other RNA
actgtttacattgcagattgc

SEQ ID NO: 509 - RNA, 21 nt, synthetic construct
  source 1..21: mol_type = other RNA
tttacattgcagattgctata

SEQ ID NO: 510 - RNA, 21 nt, synthetic construct
  source 1..21: mol_type = other RNA
ttacattgcagattgctataa

SEQ ID NO: 511 - RNA, 21 nt, synthetic construct
  source 1..21: mol_type = other RNA
tacattgcagattgctataat

SEQ ID NO: 512 - RNA, 21 nt, synthetic construct
  source 1..21: mol_type = other RNA
attgctataatttcaaggagt

SEQ ID NO: 513 - RNA, 21 nt, synthetic construct
  source 1..21: mol_type = other RNA
ttgctataatttcaaggagtg

SEQ ID NO: 514 - RNA, 21 nt, synthetic construct
  source 1..21: mol_type = other RNA
aatgatgcactttaggatgtt

SEQ ID NO: 515 - RNA, 21 nt, synthetic construct
  source 1..21: mol_type = other RNA
atgatgcactttaggatgttt

SEQ ID NO: 516 - RNA, 21 nt, synthetic construct
  source 1..21: mol_type = other RNA
acatgaatcattcacatgacc

SEQ ID NO: 517 - RNA, 21 nt, synthetic construct
  source 1..21: mol_type = other RNA
catgaatcattcacatgacca

SEQ ID NO: 518 - RNA, 21 nt, synthetic construct
  source 1..21: mol_type = other RNA
aaatacatgtctagtctgtcc

SEQ ID NO: 519 - RNA, 21 nt, synthetic construct
  source 1..21: mol_type = other RNA
aatacatgtctagtctgtcct

SEQ ID NO: 520 - RNA, 21 nt, synthetic construct
  source 1..21: mol_type = other RNA
atgtctagtctgtcctttaat

SEQ ID NO: 521 - RNA, 21 nt, synthetic construct
  source 1..21: mol_type = other RNA
tgtctagtctgtcctttaata

SEQ ID NO: 522 - RNA, 21 nt, synthetic construct
  source 1..21: mol_type = other RNA
tctagtctgtcctttaatagc

SEQ ID NO: 523 - RNA, 21 nt, synthetic construct
  source 1..21: mol_type = other RNA
ctagtctgtcctttaatagct

SEQ ID NO: 524 - RNA, 21 nt, synthetic construct
  source 1..21: mol_type = other RNA
tagtctgtcctttaatagctc

SEQ ID NO: 525 - RNA, 21 nt, synthetic construct
  source 1..21: mol_type = other RNA
gtctgtcctttaatagctctc

SEQ ID NO: 526 - RNA, 21 nt, synthetic construct
  source 1..21: mol_type = other RNA
aatcagatcattaccagttag

SEQ ID NO: 527 - RNA, 21 nt, synthetic construct
  source 1..21: mol_type = other RNA
tcagatcattaccagttagct

SEQ ID NO: 528 - RNA, 21 nt, synthetic construct
  source 1..21: mol_type = other RNA
cagatcattaccagttagctt

SEQ ID NO: 529 - RNA, 21 nt, synthetic construct
  source 1..21: mol_type = other RNA
agatcattaccagttagcttt

SEQ ID NO: 530 - RNA, 21 nt, synthetic construct
  source 1..21: mol_type = other RNA
tcattaccagttagcttttaa

SEQ ID NO: 531 - RNA, 21 nt, synthetic construct
  source 1..21: mol_type = other RNA
cattaccagttagcttttaaa

SEQ ID NO: 532 - RNA, 21 nt, synthetic construct
  source 1..21: mol_type = other RNA
accagttagcttttaaagcac

SEQ ID NO: 533 - RNA, 21 nt, synthetic construct
  source 1..21: mol_type = other RNA
aagcacatttgtttaagacta

SEQ ID NO: 534 - RNA, 21 nt, synthetic construct
  source 1..21: mol_type = other RNA
gcacatttgtttaagactatg

SEQ ID NO: 535 - RNA, 21 nt, synthetic construct
  source 1..21: mol_type = other RNA
ctatgtttttggaaaaatacg

SEQ ID NO: 536 - RNA, 21 nt, synthetic construct
  source 1..21: mol_type = other RNA
gtttttggaaaaatacgctac

SEQ ID NO: 537 - RNA, 21 nt, synthetic construct
  source 1..21: mol_type = other RNA
ttggaaaaatacgctacagaa

SEQ ID NO: 538 - RNA, 21 nt, synthetic construct
  source 1..21: mol_type = other RNA
aataaatgagatgctactaat

SEQ ID NO: 539 - RNA, 21 nt, synthetic construct
  source 1..21: mol_type = other RNA
tgagatgctactaattgtttt

SEQ ID NO: 540 - RNA, 21 nt, synthetic construct
  source 1..21: mol_type = other RNA
tttggaatctgttgtttctgc

SEQ ID NO: 541 - RNA, 21 nt, synthetic construct
  source 1..21: mol_type = other RNA
ttctgccaaaggtaaattaac

SEQ ID NO: 542 - RNA, 21 nt, synthetic construct
  source 1..21: mol_type = other RNA
tctgccaaaggtaaattaact

SEQ ID NO: 543 - RNA, 21 nt, synthetic construct
  source 1..21: mol_type = other RNA
gatttattcaggaatccccat

SEQ ID NO: 544 - RNA, 21 nt, synthetic construct
  source 1..21: mol_type = other RNA
attcaggaatccccatttgaa

SEQ ID NO: 545 - RNA, 21 nt, synthetic construct
  source 1..21: mol_type = other RNA
ggaatccccatttgaatttgt

SEQ ID NO: 546 - RNA, 21 nt, synthetic construct
  source 1..21: mol_type = other RNA
attgctgacttggggtacatg

SEQ ID NO: 547 - RNA, 21 nt, synthetic construct
  source 1..21: mol_type = other RNA
acattgctgacttggggtaca

SEQ ID NO: 548 - RNA, 21 nt, synthetic construct
  source 1..21: mol_type = other RNA
cacattgctgacttggggtac

SEQ ID NO: 549 - RNA, 21 nt, synthetic construct
  source 1..21: mol_type = other RNA
ctccggttgcagacacattgc

SEQ ID NO: 550 - RNA, 21 nt, synthetic construct
  source 1..21: mol_type = other RNA
tctccggttgcagacacattg

SEQ ID NO: 551 - RNA, 21 nt, synthetic construct
  source 1..21: mol_type = other RNA
ttctccggttgcagacacatt

SEQ ID NO: 552 - RNA, 21 nt, synthetic construct
  source 1..21: mol_type = other RNA
agttctccggttgcagacaca

SEQ ID NO: 553 - RNA, 21 nt, synthetic construct
  source 1..21: mol_type = other RNA
gagttctccggttgcagacac

SEQ ID NO: 554 - RNA, 21 nt, synthetic construct
  source 1..21: mol_type = other RNA
agagttctccggttgcagaca

SEQ ID NO: 555 - RNA, 21 nt, synthetic construct
  source 1..21: mol_type = other RNA
aagagttctccggttgcagac

SEQ ID NO: 556 - RNA, 21 nt, synthetic construct
  source 1..21: mol_type = other RNA
taagagttctccggttgcaga

SEQ ID NO: 557 - RNA, 21 nt, synthetic construct
  source 1..21: mol_type = other RNA
ctaagagttctccggttgcag

SEQ ID NO: 558 - RNA, 21 nt, synthetic construct
  source 1..21: mol_type = other RNA
tctaagagttctccggttgca

SEQ ID NO: 559 - RNA, 21 nt, synthetic construct
  source 1..21: mol_type = other RNA
ttctaagagttctccggttgc

SEQ ID NO: 560 - RNA, 21 nt, synthetic construct
  source 1..21: mol_type = other RNA
ctttctaagagttctccggtt

SEQ ID NO: 561 - RNA, 21 nt, synthetic construct
  source 1..21: mol_type = other RNA
atcggatggttctttctaaga

SEQ ID NO: 562 - RNA, 21 nt, synthetic construct
  source 1..21: mol_type = other RNA
gatcggatggttctttctaag

SEQ ID NO: 563 - RNA, 21 nt, synthetic construct
  source 1..21: mol_type = other RNA
tgatcggatggttctttctaa

SEQ ID NO: 564 - RNA, 21 nt, synthetic construct
  source 1..21: mol_type = other RNA
gctgatcggatggttctttct

SEQ ID NO: 565 - RNA, 21 nt, synthetic construct
  source 1..21: mol_type = other RNA
cagctgatcggatggttcttt

SEQ ID NO: 566 - RNA, 21 nt, synthetic construct
  source 1..21: mol_type = other RNA
acagctgatcggatggttctt

SEQ ID NO: 567 - RNA, 21 nt, synthetic construct
  source 1..21: mol_type = other RNA
ctacagctgatcggatggttc

SEQ ID NO: 568 - RNA, 21 nt, synthetic construct
  source 1..21: mol_type = other RNA
ttctacagctgatcggatggt

SEQ ID NO: 569 - RNA, 21 nt, synthetic construct
  source 1..21: mol_type = other RNA
tgttgttctacagctgatcgg

SEQ ID NO: 570 - RNA, 21 nt, synthetic construct
  source 1..21: mol_type = other RNA
acctccagagttattaacatc

SEQ ID NO: 571 - RNA, 21 nt, synthetic construct
  source 1..21: mol_type = other RNA
ctttgacctccagagttatta

SEQ ID NO: 572 - RNA, 21 nt, synthetic construct
  source 1..21: mol_type = other RNA
aactttgacctccagagttat

SEQ ID NO: 573 - RNA, 21 nt, synthetic construct
  source 1..21: mol_type = other RNA
gatgctgatagtgttccagat

SEQ ID NO: 574 - RNA, 21 nt, synthetic construct
  source 1..21: mol_type = other RNA
tcccatgtcgaacttcatcct

SEQ ID NO: 575 - RNA, 21 nt, synthetic construct
  source 1..21: mol_type = other RNA
cttgtctctcccatgtcgaac

SEQ ID NO: 576 - RNA, 21 nt, synthetic construct
  source 1..21: mol_type = other RNA
tcccttgtctctcccatgtcg

SEQ ID NO: 577 - RNA, 21 nt, synthetic construct
  source 1..21: mol_type = other RNA
agtcccttgtctctcccatgt

SEQ ID NO: 578 - RNA, 21 nt, synthetic construct
  source 1..21: mol_type = other RNA
taagtcccttgtctctcccat

SEQ ID NO: 579 - RNA, 21 nt, synthetic construct
  source 1..21: mol_type = other RNA
gataagtcccttgtctctccc

SEQ ID NO: 580 - RNA, 21 nt, synthetic construct
  source 1..21: mol_type = other RNA
tgataagtcccttgtctctcc

SEQ ID NO: 581 - RNA, 21 nt, synthetic construct
  source 1..21: mol_type = other RNA
ttgataagtcccttgtctctc

SEQ ID NO: 582 - RNA, 21 nt, synthetic construct
  source 1..21: mol_type = other RNA
tttgttgataagtcccttgtc

SEQ ID NO: 583 - RNA, 21 nt, synthetic construct
  source 1..21: mol_type = other RNA
ctttgttgataagtcccttgt

SEQ ID NO: 584 - RNA, 21 nt, synthetic construct
  source 1..21: mol_type = other RNA
ttttctttgttgataagtccc

SEQ ID NO: 585 - RNA, 21 nt, synthetic construct
  source 1..21: mol_type = other RNA
acccagaaggagtattttctt

SEQ ID NO: 586 - RNA, 21 nt, synthetic construct
  source 1..21: mol_type = other RNA
ggttgaacccagaaggagtat

SEQ ID NO: 587 - RNA, 21 nt, synthetic construct
  source 1..21: mol_type = other RNA
caatcatcaaggtggttgaac

SEQ ID NO: 588 - RNA, 21 nt, synthetic construct
  source 1..21: mol_type = other RNA
acaatcatcaaggtggttgaa

SEQ ID NO: 589 - RNA, 21 nt, synthetic construct
  source 1..21: mol_type = other RNA
ttcgacttcctgagtattcaa

SEQ ID NO: 590 - RNA, 21 nt, synthetic construct
  source 1..21: mol_type = other RNA
taccttttcgacttcctgagt

SEQ ID NO: 591 - RNA, 21 nt, synthetic construct
  source 1..21: mol_type = other RNA
gtaccttttcgacttcctgag

SEQ ID NO: 592 - RNA, 21 nt, synthetic construct
  source 1..21: mol_type = other RNA
tgtaccttttcgacttcctga

SEQ ID NO: 593 - RNA, 21 nt, synthetic construct
  source 1..21: mol_type = other RNA
tgtgtaccttttcgacttcct

SEQ ID NO: 594 - RNA, 21 nt, synthetic construct
  source 1..21: mol_type = other RNA
tatttttgtgtaccttttcga

SEQ ID NO: 595 - RNA, 21 nt, synthetic construct
  source 1..21: mol_type = other RNA
gtatttttgtgtaccttttcg

SEQ ID NO: 596 - RNA, 21 nt, synthetic construct
  source 1..21: mol_type = other RNA
gtttaggcttgctcctttctc

SEQ ID NO: 597 - RNA, 21 nt, synthetic construct
  source 1..21: mol_type = other RNA
cgtttaggcttgctcctttct

SEQ ID NO: 598 - RNA, 21 nt, synthetic construct
  source 1..21: mol_type = other RNA
acgtttaggcttgctcctttc

SEQ ID NO: 599 - RNA, 21 nt, synthetic construct
  source 1..21: mol_type = other RNA
ctgacgtttaggcttgctcct

SEQ ID NO: 600 - RNA, 21 nt, synthetic construct
  source 1..21: mol_type = other RNA
tctgacgtttaggcttgctcc

SEQ ID NO: 601 - RNA, 21 nt, synthetic construct
  source 1..21: mol_type = other RNA
ttctgacgtttaggcttgctc

SEQ ID NO: 602 - RNA, 21 nt, synthetic construct
  source 1..21: mol_type = other RNA
tttctgacgtttaggcttgct

SEQ ID NO: 603 - RNA, 21 nt, synthetic construct
  source 1..21: mol_type = other RNA
atttctgacgtttaggcttgc

SEQ ID NO: 604 - RNA, 21 nt, synthetic construct
  source 1..21: mol_type = other RNA
gatttctgacgtttaggcttg

SEQ ID NO: 605 - RNA, 21 nt, synthetic construct
  source 1..21: mol_type = other RNA
ggatttctgacgtttaggctt

SEQ ID NO: 606 - RNA, 21 nt, synthetic construct
  source 1..21: mol_type = other RNA
gtttagtactggatttctgac

SEQ ID NO: 607 - RNA, 21 nt, synthetic construct
  source 1..21: mol_type = other RNA
agtttagtactggatttctga

SEQ ID NO: 608 - RNA, 21 nt, synthetic construct
  source 1..21: mol_type = other RNA
gattgtcatgaagctcagaaa

SEQ ID NO: 609 - RNA, 21 nt, synthetic construct
  source 1..21: mol_type = other RNA
cgtcctgattgtcatgaagct

SEQ ID NO: 610 - RNA, 21 nt, synthetic construct
  source 1..21: mol_type = other RNA
gaccgtcctgattgtcatgaa

SEQ ID NO: 611 - RNA, 21 nt, synthetic construct
  source 1..21: mol_type = other RNA
agaccgtcctgattgtcatga

SEQ ID NO: 612 - RNA, 21 nt, synthetic construct
  source 1..21: mol_type = other RNA
aagaccgtcctgattgtcatg

SEQ ID NO: 613 - RNA, 21 nt, synthetic construct
  source 1..21: mol_type = other RNA
caagaccgtcctgattgtcat

SEQ ID NO: 614 - RNA, 21 nt, synthetic construct
  source 1..21: mol_type = other RNA
acaagaccgtcctgattgtca

SEQ ID NO: 615 - RNA, 21 nt, synthetic construct
  source 1..21: mol_type = other RNA
cacaagaccgtcctgattgtc

SEQ ID NO: 616 - RNA, 21 nt, synthetic construct
  source 1..21: mol_type = other RNA
tcacaagaccgtcctgattgt

SEQ ID NO: 617 - RNA, 21 nt, synthetic construct
  source 1..21: mol_type = other RNA
attcacaagaccgtcctgatt

SEQ ID NO: 618 - RNA, 21 nt, synthetic construct
  source 1..21: mol_type = other RNA
tattcacaagaccgtcctgat

SEQ ID NO: 619 - RNA, 21 nt, synthetic construct
  source 1..21: mol_type = other RNA
atattcacaagaccgtcctga

SEQ ID NO: 620 - RNA, 21 nt, synthetic construct
  source 1..21: mol_type = other RNA
actttccatattcacaagacc

SEQ ID NO: 621 - RNA, 21 nt, synthetic construct
  source 1..21: mol_type = other RNA
tcgtgtggaattgagactttc

SEQ ID NO: 622 - RNA, 21 nt, synthetic construct
  source 1..21: mol_type = other RNA
atcgtgtggaattgagacttt

SEQ ID NO: 623 - RNA, 21 nt, synthetic construct
  source 1..21: mol_type = other RNA
gatcgtgtggaattgagactt

SEQ ID NO: 624 - RNA, 21 nt, synthetic construct
  source 1..21: mol_type = other RNA
agatcgtgtggaattgagact

SEQ ID NO: 625 - RNA, 21 nt, synthetic construct
  source 1..21: mol_type = other RNA
gagatcgtgtggaattgagac

SEQ ID NO: 626 - RNA, 21 nt, synthetic construct
  source 1..21: mol_type = other RNA
tgagatcgtgtggaattgaga

SEQ ID NO: 627 - RNA, 21 nt, synthetic construct
  source 1..21: mol_type = other RNA
atgagatcgtgtggaattgag

SEQ ID NO: 628 - RNA, 21 nt, synthetic construct
  source 1..21: mol_type = other RNA
catgagatcgtgtggaattga

SEQ ID NO: 629 - RNA, 21 nt, synthetic construct
  source 1..21: mol_type = other RNA
tcatgagatcgtgtggaattg

SEQ ID NO: 630 - RNA, 21 nt, synthetic construct
  source 1..21: mol_type = other RNA
tctcatgagatcgtgtggaat

SEQ ID NO: 631 - RNA, 21 nt, synthetic construct
  source 1..21: mol_type = other RNA
ctctcatgagatcgtgtggaa

SEQ ID NO: 632 - RNA, 21 nt, synthetic construct
  source 1..21: mol_type = other RNA
tctctcatgagatcgtgtgga

SEQ ID NO: 633 - RNA, 21 nt, synthetic construct
  source 1..21: mol_type = other RNA
cagttctctcatgagatcgtg

SEQ ID NO: 634 - RNA, 21 nt, synthetic construct
  source 1..21: mol_type = other RNA
aggtccagttctctcatgaga

SEQ ID NO: 635 - RNA, 21 nt, synthetic construct
  source 1..21: mol_type = other RNA
tcaggtccagttctctcatga

SEQ ID NO: 636 - RNA, 21 nt, synthetic construct
  source 1..21: mol_type = other RNA
atcaggtccagttctctcatg

SEQ ID NO: 637 - RNA, 21 nt, synthetic construct
  source 1..21: mol_type = other RNA
tttcatcagacatccattcaa

SEQ ID NO: 638 - RNA, 21 nt, synthetic construct
  source 1..21: mol_type = other RNA
aaaatgctgagtgtgtccacc

SEQ ID NO: 639 - RNA, 21 nt, synthetic construct
  source 1..21: mol_type = other RNA
cttcattgtggggctctcaaa

SEQ ID NO: 640 - RNA, 21 nt, synthetic construct
  source 1..21: mol_type = other RNA
tggtgtcagataggctgggat

SEQ ID NO: 641 - RNA, 21 nt, synthetic construct
  source 1..21: mol_type = other RNA
ttggtgtcagataggctggga

SEQ ID NO: 642 - RNA, 21 nt, synthetic construct
  source 1..21: mol_type = other RNA
tttggtgtcagataggctggg

SEQ ID NO: 643 - RNA, 21 nt, synthetic construct
  source 1..21: mol_type = other RNA
gtttggtgtcagataggctgg

SEQ ID NO: 644 - RNA, 21 nt, synthetic construct
  source 1..21: mol_type = other RNA
tgtttggtgtcagataggctg

SEQ ID NO: 645 - RNA, 21 nt, synthetic construct
  source 1..21: mol_type = other RNA
cggcatcttgatttctctgct

SEQ ID NO: 646 - RNA, 21 nt, synthetic construct
  source 1..21: mol_type = other RNA
ggcacttcggagacaaagctc

SEQ ID NO: 647 - RNA, 21 nt, synthetic construct
  source 1..21: mol_type = other RNA
gactggggcacttcggagaca

SEQ ID NO: 648 - RNA, 21 nt, synthetic construct
  source 1..21: mol_type = other RNA
tccgactggggcacttcggag

SEQ ID NO: 649 - RNA, 21 nt, synthetic construct
  source 1..21: mol_type = other RNA
gtccgactggggcacttcgga

SEQ ID NO: 650 - RNA, 21 nt, synthetic construct
  source 1..21: mol_type = other RNA
ggataggctcttcccagttct

SEQ ID NO: 651 - RNA, 21 nt, synthetic construct
  source 1..21: mol_type = other RNA
gggataggctcttcccagttc

SEQ ID NO: 652 - RNA, 21 nt, synthetic construct
  source 1..21: mol_type = other RNA
agaaagcagggataggctctt

SEQ ID NO: 653 - RNA, 21 nt, synthetic construct
  source 1..21: mol_type = other RNA
gacggatcaggcgcccagcct

SEQ ID NO: 654 - RNA, 21 nt, synthetic construct
  source 1..21: mol_type = other RNA
tgacggatcaggcgcccagcc

SEQ ID NO: 655 - RNA, 21 nt, synthetic construct
  source 1..21: mol_type = other RNA
ctgacggatcaggcgcccagc

SEQ ID NO: 656 - RNA, 21 nt, synthetic construct
  source 1..21: mol_type = other RNA
gctgacggatcaggcgcccag

SEQ ID NO: 657 - RNA, 21 nt, synthetic construct
  source 1..21: mol_type = other RNA
agctgacggatcaggcgccca

SEQ ID NO: 658 - RNA, 21 nt, synthetic construct
  source 1..21: mol_type = other RNA
ggggtcgctgtcttcgtccag

SEQ ID NO: 659 - RNA, 21 nt, synthetic construct
  source 1..21: mol_type = other RNA
accgaggagagagcatggggt

SEQ ID NO: 660 - RNA, 21 nt, synthetic construct
  source 1..21: mol_type = other RNA
tagaaccgaggagagagcatg

SEQ ID NO: 661 - RNA, 21 nt, synthetic construct
  source 1..21: mol_type = other RNA
gtagaaccgaggagagagcat

SEQ ID NO: 662 - RNA, 21 nt, synthetic construct
  source 1..21: mol_type = other RNA
gcgtagaaccgaggagagagc

SEQ ID NO: 663 - RNA, 21 nt, synthetic construct
  source 1..21: mol_type = other RNA
agcgtagaaccgaggagagag

SEQ ID NO: 664 - RNA, 21 nt, synthetic construct
  source 1..21: mol_type = other RNA
aagcgtagaaccgaggagaga

SEQ ID NO: 665 - RNA, 21 nt, synthetic construct
  source 1..21: mol_type = other RNA
taagcgtagaaccgaggagag

SEQ ID NO: 666 - RNA, 21 nt, synthetic construct
  source 1..21: mol_type = other RNA
ataagcgtagaaccgaggaga

SEQ ID NO: 667 - RNA, 21 nt, synthetic construct
  source 1..21: mol_type = other RNA
cataagcgtagaaccgaggag

SEQ ID NO: 668 - RNA, 21 nt, synthetic construct
  source 1..21: mol_type = other RNA
ccataagcgtagaaccgagga

SEQ ID NO: 669 - RNA, 21 nt, synthetic construct
  source 1..21: mol_type = other RNA
cccataagcgtagaaccgagg

SEQ ID NO: 670 - RNA, 21 nt, synthetic construct
  source 1..21: mol_type = other RNA
gcccataagcgtagaaccgag

SEQ ID NO: 671 - RNA, 21 nt, synthetic construct
  source 1..21: mol_type = other RNA
tgaaagaatgggagtttggtg

SEQ ID NO: 672 - RNA, 21 nt, synthetic construct
  source 1..21: mol_type = other RNA
catgaaagaatgggagtttgg

SEQ ID NO: 673 - RNA, 21 nt, synthetic construct
  source 1..21: mol_type = other RNA
cgcctcatgaaagaatgggag

SEQ ID NO: 674 - RNA, 21 nt, synthetic construct
  source 1..21: mol_type = other RNA
tcgccgcctcatgaaagaatg

SEQ ID NO: 675 - RNA, 21 nt, synthetic construct
  source 1..21: mol_type = other RNA
ttcgccgcctcatgaaagaat

SEQ ID NO: 676 - RNA, 21 nt, synthetic construct
  source 1..21: mol_type = other RNA
cttcgccgcctcatgaaagaa

SEQ ID NO: 677 - RNA, 21 nt, synthetic construct
  source 1..21: mol_type = other RNA
gcttcgccgcctcatgaaaga

SEQ ID NO: 678 - RNA, 21 nt, synthetic construct
  source 1..21: mol_type = other RNA
agcttcgccgcctcatgaaag

SEQ ID NO: 679 - RNA, 21 nt, synthetic construct
  source 1..21: mol_type = other RNA
gagcttcgccgcctcatgaaa

SEQ ID NO: 680 - RNA, 21 nt, synthetic construct
  source 1..21: mol_type = other RNA
atcatcataggaccccagaga

SEQ ID NO: 681 - RNA, 21 nt, synthetic construct
  source 1..21: mol_type = other RNA
tcgtgtgagctgggcaggtgt

SEQ ID NO: 682 - RNA, 21 nt, synthetic construct
  source 1..21: mol_type = other RNA
ttcgtgtgagctgggcaggtg

SEQ ID NO: 683 - RNA, 21 nt, synthetic construct
  source 1..21: mol_type = other RNA
ccttcgtgtgagctgggcagg

SEQ ID NO: 684 - RNA, 21 nt, synthetic construct
  source 1..21: mol_type = other RNA
tgaatccttcgtgtgagctgg

SEQ ID NO: 685 - RNA, 21 nt, synthetic construct
  source 1..21: mol_type = other RNA
tctgaatccttcgtgtgagct

SEQ ID NO: 686 - RNA, 21 nt, synthetic construct
  source 1..21: mol_type = other RNA
tctatcttcaaacttccggat

SEQ ID NO: 687 - RNA, 21 nt, synthetic construct
  source 1..21: mol_type = other RNA
gaatctatcttcaaacttccg

SEQ ID NO: 688 - RNA, 21 nt, synthetic construct
  source 1..21: mol_type = other RNA
cttcgaatctatcttcaaact

SEQ ID NO: 689 - RNA, 21 nt, synthetic construct
  source 1..21: mol_type = other RNA
tcttcgaatctatcttcaaac

SEQ ID NO: 690 - RNA, 21 nt, synthetic construct
  source 1..21: mol_type = other RNA
ctcttcttcgaatctatcttc

SEQ ID NO: 691 - RNA, 21 nt, synthetic construct
  source 1..21: mol_type = other RNA
gggaaggtctgtacttcttct

SEQ ID NO: 692 - RNA, 21 nt, synthetic construct
  source 1..21: mol_type = other RNA
tgggaaggtctgtacttcttc

SEQ ID NO: 693 - RNA, 21 nt, synthetic construct
  source 1..21: mol_type = other RNA
gtgggaaggtctgtacttctt

SEQ ID NO: 694 - RNA, 21 nt, synthetic construct
  source 1..21: mol_type = other RNA
aggtcatttgtccatttcaga

SEQ ID NO: 695 - RNA, 21 nt, synthetic construct
  source 1..21: mol_type = other RNA
aaggtcatttgtccatttcag

SEQ ID NO: 696 - RNA, 21 nt, synthetic construct
  source 1..21: mol_type = other RNA
gaatttggcaaggtcatttgt

SEQ ID NO: 697 - RNA, 21 nt, synthetic construct
  source 1..21: mol_type = other RNA
cggaatttggcaaggtcattt

SEQ ID NO: 698 - RNA, 21 nt, synthetic construct
  source 1..21: mol_type = other RNA
ccggaatttggcaaggtcatt

SEQ ID NO: 699 - RNA, 21 nt, synthetic construct
  source 1..21: mol_type = other RNA
ctccggaatttggcaaggtca

SEQ ID NO: 700 - RNA, 21 nt, synthetic construct
  source 1..21: mol_type = other RNA
tctccggaatttggcaaggtc

SEQ ID NO: 701 - RNA, 21 nt, synthetic construct
  source 1..21: mol_type = other RNA
gtctccggaatttggcaaggt

SEQ ID NO: 702 - RNA, 21 nt, synthetic construct
  source 1..21: mol_type = other RNA
tgtctccggaatttggcaagg

SEQ ID NO: 703 - RNA, 21 nt, synthetic construct
  source 1..21: mol_type = other RNA
gattctttaagttgtctccgg

SEQ ID NO: 704 - RNA, 21 nt, synthetic construct
  source 1..21: mol_type = other RNA
tgattctttaagttgtctccg

SEQ ID NO: 705 - RNA, 21 nt, synthetic construct
  source 1..21: mol_type = other RNA
ttaggtcctcttcagatatct

SEQ ID NO: 706 - RNA, 21 nt, synthetic construct
  source 1..21: mol_type = other RNA
catcctgggagttaggtcctc

SEQ ID NO: 707 - RNA, 21 nt, synthetic construct
  source 1..21: mol_type = other RNA
ccgcatcctgggagttaggtc

SEQ ID NO: 708 - RNA, 21 nt, synthetic construct
  source 1..21: mol_type = other RNA
gccgcatcctgggagttaggt

SEQ ID NO: 709 - RNA, 21 nt, synthetic construct
  source 1..21: mol_type = other RNA
gtgtgttgcttcgctgccgca

SEQ ID NO: 710 - RNA, 21 nt, synthetic construct
  source 1..21: mol_type = other RNA
agtgtgttgcttcgctgccgc

SEQ ID NO: 711 - RNA, 21 nt, synthetic construct
  source 1..21: mol_type = other RNA
ggggagtgtgttgcttcgctg

SEQ ID NO: 712 - RNA, 21 nt, synthetic construct
  source 1..21: mol_type = other RNA
ttggggagtgtgttgcttcgc

SEQ ID NO: 713 - RNA, 21 nt, synthetic construct
  source 1..21: mol_type = other RNA
aactcttggggagtgtgttgc

SEQ ID NO: 714 - RNA, 21 nt, synthetic construct
  source 1..21: mol_type = other RNA
agttgggaaccaaaactcttg

SEQ ID NO: 715 - RNA, 21 nt, synthetic construct
  source 1..21: mol_type = other RNA
tcaagttgggaaccaaaactc

SEQ ID NO: 716 - RNA, 21 nt, synthetic construct
  source 1..21: mol_type = other RNA
tctcaagttgggaaccaaaac

SEQ ID NO: 717 - RNA, 21 nt, synthetic construct
  source 1..21: mol_type = other RNA
tagattccaatgtggcttcaa

SEQ ID NO: 718 - RNA, 21 nt, synthetic construct
  source 1..21: mol_type = other RNA
ctttccgctcgcttctcctgg

SEQ ID NO: 719 - RNA, 21 nt, synthetic construct
  source 1..21: mol_type = other RNA
tttctcattagcaatctggtc

SEQ ID NO: 720 - RNA, 21 nt, synthetic construct
  source 1..21: mol_type = other RNA
cagagccactttctcattagc

SEQ ID NO: 721 - RNA, 21 nt, synthetic construct
  source 1..21: mol_type = other RNA
taccggccgtccatgaatgct

SEQ ID NO: 722 - RNA, 21 nt, synthetic construct
  source 1..21: mol_type = other RNA
ttaccggccgtccatgaatgc

SEQ ID NO: 723 - RNA, 21 nt, synthetic construct
  source 1..21: mol_type = other RNA
gttaccggccgtccatgaatg

SEQ ID NO: 724 - RNA, 21 nt, synthetic construct
  source 1..21: mol_type = other RNA
tgttaccggccgtccatgaat

SEQ ID NO: 725 - RNA, 21 nt, synthetic construct
  source 1..21: mol_type = other RNA
ttgttaccggccgtccatgaa

SEQ ID NO: 726 - RNA, 21 nt, synthetic construct
  source 1..21: mol_type = other RNA
tttgttaccggccgtccatga

SEQ ID NO: 727 - RNA, 21 nt, synthetic construct
  source 1..21: mol_type = other RNA
tctttgttaccggccgtccat

SEQ ID NO: 728 - RNA, 21 nt, synthetic construct
  source 1..21: mol_type = other RNA
ttctttgttaccggccgtcca

SEQ ID NO: 729 - RNA, 21 nt, synthetic construct
  source 1..21: mol_type = other RNA
gttctttgttaccggccgtcc

SEQ ID NO: 730 - RNA, 21 nt, synthetic construct
  source 1..21: mol_type = other RNA
tcgttctttgttaccggccgt

SEQ ID NO: 731 - RNA, 21 nt, synthetic construct
  source 1..21: mol_type = other RNA
ttcgttctttgttaccggccg

SEQ ID NO: 732 - RNA, 21 nt, synthetic construct
  source 1..21: mol_type = other RNA
gttcgttctttgttaccggcc

SEQ ID NO: 733 - RNA, 21 nt, synthetic construct
  source 1..21: mol_type = other RNA
cgttcgttctttgttaccggc

SEQ ID NO: 734 - RNA, 21 nt, synthetic construct
  source 1..21: mol_type = other RNA
ccgttcgttctttgttaccgg

SEQ ID NO: 735 - RNA, 21 nt, synthetic construct
  source 1..21: mol_type = other RNA
gccgttcgttctttgttaccg

SEQ ID NO: 736 - RNA, 21 nt, synthetic construct
  source 1..21: mol_type = other RNA
tgccgttcgttctttgttacc

SEQ ID NO: 737 - RNA, 21 nt, synthetic construct
  source 1..21: mol_type = other RNA
atcacctgccgttcgttcttt

SEQ ID NO: 738 - RNA, 21 nt, synthetic construct
  source 1..21: mol_type = other RNA
cctgtcgtatagtggcttcat

SEQ ID NO: 739 - RNA, 21 nt, synthetic construct
  source 1..21: mol_type = other RNA
tacctgtcgtatagtggcttc

SEQ ID NO: 740 - RNA, 21 nt, synthetic construct
  source 1..21: mol_type = other RNA
gtacctgtcgtatagtggctt

SEQ ID NO: 741 - RNA, 21 nt, synthetic construct
  source 1..21: mol_type = other RNA
ggtacctgtcgtatagtggct

SEQ ID NO: 742 - RNA, 21 nt, synthetic construct
  source 1..21: mol_type = other RNA
cggtacctgtcgtatagtggc

SEQ ID NO: 743 - RNA, 21 nt, synthetic construct
  source 1..21: mol_type = other RNA
ccggtacctgtcgtatagtgg

SEQ ID NO: 744 - RNA, 21 nt, synthetic construct
  source 1..21: mol_type = other RNA
gccggtacctgtcgtatagtg

SEQ ID NO: 745 - RNA, 21 nt, synthetic construct
  source 1..21: mol_type = other RNA
agccggtacctgtcgtatagt

SEQ ID NO: 746 - RNA, 21 nt, synthetic construct
  source 1..21: mol_type = other RNA
tagctcgggagaggatctgtt

SEQ ID NO: 747 - RNA, 21 nt, synthetic construct
  source 1..21: mol_type = other RNA
ttagctcgggagaggatctgt

SEQ ID NO: 748 - RNA, 21 nt, synthetic construct
  source 1..21: mol_type = other RNA
tgttagctcgggagaggatct

SEQ ID NO: 749 - RNA, 21 nt, synthetic construct
  source 1..21: mol_type = other RNA
tggtgttagctcgggagagga

SEQ ID NO: 750 - RNA, 21 nt, synthetic construct
  source 1..21: mol_type = other RNA
atggtgttagctcgggagagg

SEQ ID NO: 751 - RNA, 21 nt, synthetic construct
  source 1..21: mol_type = other RNA
tatggtgttagctcgggagag

SEQ ID NO: 752 - RNA, 21 nt, synthetic construct
  source 1..21: mol_type = other RNA
gggtatggtgttagctcggga

SEQ ID NO: 753 - RNA, 21 nt, synthetic construct
  source 1..21: mol_type = other RNA
tgggtatggtgttagctcggg

SEQ ID NO: 754 - RNA, 21 nt, synthetic construct
  source 1..21: mol_type = other RNA
ttgctatcgtcttctgacccc

SEQ ID NO: 755 - RNA, 21 nt, synthetic construct
  source 1..21: mol_type = other RNA
attgctatcgtcttctgaccc

SEQ ID NO: 756 - RNA, 21 nt, synthetic construct
  source 1..21: mol_type = other RNA
acattgctatcgtcttctgac

SEQ ID NO: 757 - RNA, 21 nt, synthetic construct
  source 1..21: mol_type = other RNA
cacattgctatcgtcttctga

SEQ ID NO: 758 - RNA, 21 nt, synthetic construct
  source 1..21: mol_type = other RNA
cttcacattgctatcgtcttc

SEQ ID NO: 759 - RNA, 21 nt, synthetic construct
  source 1..21: mol_type = other RNA
ggcttcacattgctatcgtct

SEQ ID NO: 760 - RNA, 21 nt, synthetic construct
  source 1..21: mol_type = other RNA
atcggttttcagagtgaccat

SEQ ID NO: 761 - RNA, 21 nt, synthetic construct
  source 1..21: mol_type = other RNA
aatcggttttcagagtgacca

SEQ ID NO: 762 - RNA, 21 nt, synthetic construct
  source 1..21: mol_type = other RNA
aaatcggttttcagagtgacc

SEQ ID NO: 763 - RNA, 21 nt, synthetic construct
  source 1..21: mol_type = other RNA
cgtgcactgaaatcggttttc

SEQ ID NO: 764 - RNA, 21 nt, synthetic construct
  source 1..21: mol_type = other RNA
catcgtgcactgaaatcggtt

SEQ ID NO: 765 - RNA, 21 nt, synthetic construct
  source 1..21: mol_type = other RNA
ttatcatccattggggaaata

SEQ ID NO: 766 - RNA, 21 nt, synthetic construct
  source 1..21: mol_type = other RNA
ggtattttatcatccattggg

SEQ ID NO: 767 - RNA, 21 nt, synthetic construct
  source 1..21: mol_type = other RNA
atggtattttatcatccattg

SEQ ID NO: 768 - RNA, 21 nt, synthetic construct
  source 1..21: mol_type = other RNA
ttgatggtattttatcatcca

SEQ ID NO: 769 - RNA, 21 nt, synthetic construct
  source 1..21: mol_type = other RNA
ggctgcattttgatggtattt

SEQ ID NO: 770 - RNA, 21 nt, synthetic construct
  source 1..21: mol_type = other RNA
agcatggagatttgaaagccc

SEQ ID NO: 771 - RNA, 21 nt, synthetic construct
  source 1..21: mol_type = other RNA
cagcatggagatttgaaagcc

SEQ ID NO: 772 - RNA, 21 nt, synthetic construct
  source 1..21: mol_type = other RNA
tattgaggcagcatggagatt

SEQ ID NO: 773 - RNA, 21 nt, synthetic construct
  source 1..21: mol_type = other RNA
gtattgaggcagcatggagat

SEQ ID NO: 774 - RNA, 21 nt, synthetic construct
  source 1..21: mol_type = other RNA
ggtattgaggcagcatggaga

SEQ ID NO: 775 - RNA, 21 nt, synthetic construct
  source 1..21: mol_type = other RNA
ggagttcaggtattgaggcag

SEQ ID NO: 776 - RNA, 21 nt, synthetic construct
  source 1..21: mol_type = other RNA
catttcctggaggtgttccag

SEQ ID NO: 777 - RNA, 21 nt, synthetic construct
  source 1..21: mol_type = other RNA
gttgtcttcaaaatcccgaag

SEQ ID NO: 778 - RNA, 21 nt, synthetic construct
  source 1..21: mol_type = other RNA
ggagtgcggtcttccttctgg

SEQ ID NO: 779 - RNA, 21 nt, synthetic construct
  source 1..21: mol_type = other RNA
ataggagtgcggtcttccttc

SEQ ID NO: 780 - RNA, 21 nt, synthetic construct
  source 1..21: mol_type = other RNA
cataggagtgcggtcttcctt

SEQ ID NO: 781 - RNA, 21 nt, synthetic construct
  source 1..21: mol_type = other RNA
ccataggagtgcggtcttcct

SEQ ID NO: 782 - RNA, 21 nt, synthetic construct
  source 1..21: mol_type = other RNA
gccataggagtgcggtcttcc

SEQ ID NO: 783 - RNA, 21 nt, synthetic construct
  source 1..21: mol_type = other RNA
agccataggagtgcggtcttc

SEQ ID NO: 784 - RNA, 21 nt, synthetic construct
  source 1..21: mol_type = other RNA
tcagccataggagtgcggtct

SEQ ID NO: 785 - RNA, 21 nt, synthetic construct
  source 1..21: mol_type = other RNA
tcttcagccataggagtgcgg

SEQ ID NO: 786 - RNA, 21 nt, synthetic construct
  source 1..21: mol_type = other RNA
agtttcgcctttatgtgctta

SEQ ID NO: 787 - RNA, 21 nt, synthetic construct
  source 1..21: mol_type = other RNA
cagtttcgcctttatgtgctt

SEQ ID NO: 788 - RNA, 21 nt, synthetic construct
  source 1..21: mol_type = other RNA
ctcagtttcgcctttatgtgc

SEQ ID NO: 789 - RNA, 21 nt, synthetic construct
  source 1..21: mol_type = other RNA
ccctcacatggacttggaatc

SEQ ID NO: 790 - RNA, 21 nt, synthetic construct
  source 1..21: mol_type = other RNA
cccctcacatggacttggaat

SEQ ID NO: 791 - RNA, 21 nt, synthetic construct
  source 1..21: mol_type = other RNA
atgcccctcacatggacttgg

SEQ ID NO: 792 - RNA, 21 nt, synthetic construct
  source 1..21: mol_type = other RNA
catgcccctcacatggacttg

SEQ ID NO: 793 - RNA, 21 nt, synthetic construct
  source 1..21: mol_type = other RNA
ggccatgcccctcacatggac

SEQ ID NO: 794 - RNA, 21 nt, synthetic construct
  source 1..21: mol_type = other RNA
gtaaactctcaccgcagctgc

SEQ ID NO: 795 - RNA, 21 nt, synthetic construct
  source 1..21: mol_type = other RNA
cagtaaactctcaccgcagct

SEQ ID NO: 796 - RNA, 21 nt, synthetic construct
  source 1..21: mol_type = other RNA
cagagctgcactttctctggg

SEQ ID NO: 797 - RNA, 21 nt, synthetic construct
  source 1..21: mol_type = other RNA
gcagaagggctgcatgctttg

SEQ ID NO: 798 - RNA, 21 nt, synthetic construct
  source 1..21: mol_type = other RNA
aaatggtctagaggcagaagg

SEQ ID NO: 799 - RNA, 21 nt, synthetic construct
  source 1..21: mol_type = other RNA
gccaaatggtctagaggcaga

SEQ ID NO: 800 - RNA, 21 nt, synthetic construct
  source 1..21: mol_type = other RNA
gccgatgccaaatggtctaga

SEQ ID NO: 801 - RNA, 21 nt, synthetic construct
  source 1..21: mol_type = other RNA
agccgatgccaaatggtctag

SEQ ID NO: 802 - RNA, 21 nt, synthetic construct
  source 1..21: mol_type = other RNA
gagccgatgccaaatggtcta

SEQ ID NO: 803 - RNA, 21 nt, synthetic construct
  source 1..21: mol_type = other RNA
ggagccgatgccaaatggtct

SEQ ID NO: 804 - RNA, 21 nt, synthetic construct
  source 1..21: mol_type = other RNA
gaaacaggagccgatgccaaa

SEQ ID NO: 805 - RNA, 21 nt, synthetic construct
  source 1..21: mol_type = other RNA
atggaaacaggagccgatgcc

SEQ ID NO: 806 - RNA, 21 nt, synthetic construct
  source 1..21: mol_type = other RNA
ggcaatggaaacaggagccga

SEQ ID NO: 807 - RNA, 21 nt, synthetic construct
  source 1..21: mol_type = other RNA
caggcaatggaaacaggagcc

SEQ ID NO: 808 - RNA, 21 nt, synthetic construct
  source 1..21: mol_type = other RNA
tttccaattacaaaatgccta

SEQ ID NO: 809 - RNA, 21 nt, synthetic construct
  source 1..21: mol_type = other RNA
ctttccaattacaaaatgcct

SEQ ID NO: 810 - RNA, 21 nt, synthetic construct
  source 1..21: mol_type = other RNA
ttgactttccaattacaaaat

SEQ ID NO: 811 - RNA, 21 nt, synthetic construct
  source 1..21: mol_type = other RNA
tcttgactttccaattacaaa

SEQ ID NO: 812 - RNA, 21 nt, synthetic construct
  source 1..21: mol_type = other RNA
tgcagtcttgactttccaatt

SEQ ID NO: 813 - RNA, 21 nt, synthetic construct
  source 1..21: mol_type = other RNA
atactgcagtcttgactttcc

SEQ ID NO: 814 - RNA, 21 nt, synthetic construct
  source 1..21: mol_type = other RNA
tgcacatactgcagtcttgac

SEQ ID NO: 815 - RNA, 21 nt, synthetic construct
  source 1..21: mol_type = other RNA
gtgcacatactgcagtcttga

SEQ ID NO: 816 - RNA, 21 nt, synthetic construct
  source 1..21: mol_type = other RNA
aagctccactactgtgtgtgt

SEQ ID NO: 817 - RNA, 21 nt, synthetic construct
  source 1..21: mol_type = other RNA
ggaaagctccactactgtgtg

SEQ ID NO: 818 - RNA, 21 nt, synthetic construct
  source 1..21: mol_type = other RNA
aggaaagctccactactgtgt

SEQ ID NO: 819 - RNA, 21 nt, synthetic construct
  source 1..21: mol_type = other RNA
ttaggaaagctccactactgt

SEQ ID NO: 820 - RNA, 21 nt, synthetic construct
  source 1..21: mol_type = other RNA
ctctgctagtgttaggaaagc

SEQ ID NO: 821 - RNA, 21 nt, synthetic construct
  source 1..21: mol_type = other RNA
gattaatctctgctagtgtta

SEQ ID NO: 822 - RNA, 21 nt, synthetic construct
  source 1..21: mol_type = other RNA
tgattaatctctgctagtgtt

SEQ ID NO: 823 - RNA, 21 nt, synthetic construct
  source 1..21: mol_type = other RNA
gtgattaatctctgctagtgt

SEQ ID NO: 824 - RNA, 21 nt, synthetic construct
  source 1..21: mol_type = other RNA
gtagtgattaatctctgctag

SEQ ID NO: 825 - RNA, 21 nt, synthetic construct
  source 1..21: mol_type = other RNA
ctaatgtagtgattaatctct

SEQ ID NO: 826 - RNA, 21 nt, synthetic construct
  source 1..21: mol_type = other RNA
gatgagtgttgtctaatgtag

SEQ ID NO: 827 - RNA, 21 nt, synthetic construct
  source 1..21: mol_type = other RNA
agatgagtgttgtctaatgta

SEQ ID NO: 828 - RNA, 21 nt, synthetic construct
  source 1..21: mol_type = other RNA
gtagatgagtgttgtctaatg

SEQ ID NO: 829 - RNA, 21 nt, synthetic construct
  source 1..21: mol_type = other RNA
tctcttgtttctcagttatcc

SEQ ID NO: 830 - RNA, 21 nt, synthetic construct
  source 1..21: mol_type = other RNA
agttagacagagaatggtctc

SEQ ID NO: 831 - RNA, 21 nt, synthetic construct
  source 1..21: mol_type = other RNA
gtttttatcacagttagacag

SEQ ID NO: 832 - RNA, 21 nt, synthetic construct
  source 1..21: mol_type = other RNA
ctctatagaataaagtcctga

SEQ ID NO: 833 - RNA, 21 nt, synthetic construct
  source 1..21: mol_type = other RNA
gtttgctctatagaataaagt

SEQ ID NO: 834 - RNA, 21 nt, synthetic construct
  source 1..21: mol_type = other RNA
caagtttgctctatagaataa

SEQ ID NO: 835 - RNA, 21 nt, synthetic construct
  source 1..21: mol_type = other RNA
gcaagtttgctctatagaata

SEQ ID NO: 836 - RNA, 21 nt, synthetic construct
  source 1..21: mol_type = other RNA
cagcaagtttgctctatagaa

SEQ ID NO: 837 - RNA, 21 nt, synthetic construct
  source 1..21: mol_type = other RNA
ggagagcatggccctccacag

SEQ ID NO: 838 - RNA, 21 nt, synthetic construct
  source 1..21: mol_type = other RNA
ttaactgggtccaaggagagc

SEQ ID NO: 839 - RNA, 21 nt, synthetic construct
  source 1..21: mol_type = other RNA
agttaactgggtccaaggaga

SEQ ID NO: 840 - RNA, 21 nt, synthetic construct
  source 1..21: mol_type = other RNA
cagttaactgggtccaaggag

SEQ ID NO: 841 - RNA, 21 nt, synthetic construct
  source 1..21: mol_type = other RNA
tgcagttaactgggtccaagg

SEQ ID NO: 842 - RNA, 21 nt, synthetic construct
  source 1..21: mol_type = other RNA
ttgcagttaactgggtccaag

SEQ ID NO: 843 - RNA, 21 nt, synthetic construct
  source 1..21: mol_type = other RNA
cgtttgcagttaactgggtcc

SEQ ID NO: 844 - RNA, 21 nt, synthetic construct
  source 1..21: mol_type = other RNA
acgtttgcagttaactgggtc

SEQ ID NO: 845 - RNA, 21 nt, synthetic construct
  source 1..21: mol_type = other RNA
cacgtttgcagttaactgggt

SEQ ID NO: 846 - RNA, 21 nt, synthetic construct
  source 1..21: mol_type = other RNA
gcacgtttgcagttaactggg

SEQ ID NO: 847 - RNA, 21 nt, synthetic construct
  source 1..21: mol_type = other RNA
tgcacgtttgcagttaactgg

SEQ ID NO: 848 - RNA, 21 nt, synthetic construct
  source 1..21: mol_type = other RNA
atgcacgtttgcagttaactg

SEQ ID NO: 849 - RNA, 21 nt, synthetic construct
  source 1..21: mol_type = other RNA
ccaatgcacgtttgcagttaa

SEQ ID NO: 850 - RNA, 21 nt, synthetic construct
  source 1..21: mol_type = other RNA
ggctccaatgcacgtttgcag

SEQ ID NO: 851 - RNA, 21 nt, synthetic construct
  source 1..21: mol_type = other RNA
gggctccaatgcacgtttgca

SEQ ID NO: 852 - RNA, 21 nt, synthetic construct
  source 1..21: mol_type = other RNA
aatagggctccaatgcacgtt

SEQ ID NO: 853 - RNA, 21 nt, synthetic construct
  source 1..21: mol_type = other RNA
aaatagggctccaatgcacgt

SEQ ID NO: 854 - RNA, 21 nt, synthetic construct
  source 1..21: mol_type = other RNA
gcaaatagggctccaatgcac

SEQ ID NO: 855 - RNA, 21 nt, synthetic construct
  source 1..21: mol_type = other RNA
agcaaatagggctccaatgca

SEQ ID NO: 856 - RNA, 21 nt, synthetic construct
  source 1..21: mol_type = other RNA
gcggcagcaaatagggctcca

SEQ ID NO: 857 - RNA, 21 nt, synthetic construct
  source 1..21: mol_type = other RNA
agcggcagcaaatagggctcc

SEQ ID NO: 858 - RNA, 21 nt, synthetic construct
  source 1..21: mol_type = other RNA
cagcggcagcaaatagggctc

SEQ ID NO: 859 - RNA, 21 nt, synthetic construct
  source 1..21: mol_type = other RNA
gcagcggcagcaaatagggct

SEQ ID NO: 860 - RNA, 21 nt, synthetic construct
  source 1..21: mol_type = other RNA
aggtcactagaatggcagcgg

SEQ ID NO: 861 - RNA, 21 nt, synthetic construct
  source 1..21: mol_type = other RNA
ggaaaggtcactagaatggca

SEQ ID NO: 862 - RNA, 21 nt, synthetic construct
  source 1..21: mol_type = other RNA
tggaaaggtcactagaatggc

SEQ ID NO: 863 - RNA, 21 nt, synthetic construct
  source 1..21: mol_type = other RNA
gctctgtggaaaggtcactag

SEQ ID NO: 864 - RNA, 21 nt, synthetic construct
  source 1..21: mol_type = other RNA
acgtgaggaaggcgcagctct

SEQ ID NO: 865 - RNA, 21 nt, synthetic construct
  source 1..21: mol_type = other RNA
tcacacacgtgaggaaggcgc

SEQ ID NO: 866 - RNA, 21 nt, synthetic construct
  source 1..21: mol_type = other RNA
aaacctttcacacacgtgagg

SEQ ID NO: 867 - RNA, 21 nt, synthetic construct
  source 1..21: mol_type = other RNA
aaaacctttcacacacgtgag

SEQ ID NO: 868 - RNA, 21 nt, synthetic construct
  source 1..21: mol_type = other RNA
tccatctacctgagggctgaa

SEQ ID NO: 869 - RNA, 21 nt, synthetic construct
  source 1..21: mol_type = other RNA
ttccatctacctgagggctga

SEQ ID NO: 870 - RNA, 21 nt, synthetic construct
  source 1..21: mol_type = other RNA
gcttccatctacctgagggct

SEQ ID NO: 871 - RNA, 21 nt, synthetic construct
  source 1..21: mol_type = other RNA
gatgactgcactgccatcgtg

SEQ ID NO: 872 - RNA, 21 nt, synthetic construct
  source 1..21: mol_type = other RNA
agtcctgaagaaacatcctga

SEQ ID NO: 873 - RNA, 21 nt, synthetic construct
  source 1..21: mol_type = other RNA
aattccttgtcagctgaggaa

SEQ ID NO: 874 - RNA, 21 nt, synthetic construct
  source 1..21: mol_type = other RNA
gaccaaaattccttgtcagct

SEQ ID NO: 875 - RNA, 21 nt, synthetic construct
  source 1..21: mol_type = other RNA
cctaggcagggaccaaaattc

SEQ ID NO: 876 - RNA, 21 nt, synthetic construct
  source 1..21: mol_type = other RNA
tcctaggcagggaccaaaatt

SEQ ID NO: 877 - RNA, 21 nt, synthetic construct
  source 1..21: mol_type = other RNA
ggtcctaggcagggaccaaaa

SEQ ID NO: 878 - RNA, 21 nt, synthetic construct
  source 1..21: mol_type = other RNA
cggtcctaggcagggaccaaa

SEQ ID NO: 879 - RNA, 21 nt, synthetic construct
  source 1..21: mol_type = other RNA
agatgacccggtcctaggcag

SEQ ID NO: 880 - RNA, 21 nt, synthetic construct
  source 1..21: mol_type = other RNA
agctgcttaccatctctctgt

SEQ ID NO: 881 - RNA, 21 nt, synthetic construct
  source 1..21: mol_type = other RNA
tacagctgcttaccatctctc

SEQ ID NO: 882 - RNA, 21 nt, synthetic construct
  source 1..21: mol_type = other RNA
atacagctgcttaccatctct

SEQ ID NO: 883 - RNA, 21 nt, synthetic construct
  source 1..21: mol_type = other RNA
catacagctgcttaccatctc

SEQ ID NO: 884 - RNA, 21 nt, synthetic construct
  source 1..21: mol_type = other RNA
agcattcatacagctgcttac

SEQ ID NO: 885 - RNA, 21 nt, synthetic construct
  source 1..21: mol_type = other RNA
atcagcattcatacagctgct

SEQ ID NO: 886 - RNA, 21 nt, synthetic construct
  source 1..21: mol_type = other RNA
ccatgacctggttttaaaatc

SEQ ID NO: 887 - RNA, 21 nt, synthetic construct
  source 1..21: mol_type = other RNA
tcccatgacctggttttaaaa

SEQ ID NO: 888 - RNA, 21 nt, synthetic construct
  source 1..21: mol_type = other RNA
gtaagtgcagtcagtgttcag

SEQ ID NO: 889 - RNA, 21 nt, synthetic construct
  source 1..21: mol_type = other RNA
ggtaagtgcagtcagtgttca

SEQ ID NO: 890 - RNA, 21 nt, synthetic construct
  source 1..21: mol_type = other RNA
ataaaatcagactggtaagtg

SEQ ID NO: 891 - RNA, 21 nt, synthetic construct
  source 1..21: mol_type = other RNA
tgacgataaaatcagactggt

SEQ ID NO: 892 - RNA, 21 nt, synthetic construct
  source 1..21: mol_type = other RNA
ttgacgataaaatcagactgg

SEQ ID NO: 893 - RNA, 21 nt, synthetic construct
  source 1..21: mol_type = other RNA
gtgtttgacgataaaatcaga

SEQ ID NO: 894 - RNA, 21 nt, synthetic construct
  source 1..21: mol_type = other RNA
ggtgtttgacgataaaatcag

SEQ ID NO: 895 - RNA, 21 nt, synthetic construct
  source 1..21: mol_type = other RNA
tggtgtttgacgataaaatca

SEQ ID NO: 896 - RNA, 21 nt, synthetic construct
  source 1..21: mol_type = other RNA
ttggtgtttgacgataaaatc

SEQ ID NO: 897 - RNA, 21 nt, synthetic construct
  source 1..21: mol_type = other RNA
cttggtgtttgacgataaaat

SEQ ID NO: 898 - RNA, 21 nt, synthetic construct
  source 1..21: mol_type = other RNA
tggcttggtgtttgacgataa

SEQ ID NO: 899 - RNA, 21 nt, synthetic construct
  source 1..21: mol_type = other RNA
ctggcttggtgtttgacgata

SEQ ID NO: 900 - RNA, 21 nt, synthetic construct
  source 1..21: mol_type = other RNA
aaacagattgccatgagcatg

SEQ ID NO: 901 - RNA, 21 nt, synthetic construct
  source 1..21: mol_type = other RNA
gccccaaacagattgccatga

SEQ ID NO: 902 - RNA, 21 nt, synthetic construct
  source 1..21: mol_type = other RNA
tggctagtgccacaacaaaac

SEQ ID NO: 903 - RNA, 21 nt, synthetic construct
  source 1..21: mol_type = other RNA
ttggctagtgccacaacaaaa

SEQ ID NO: 904 - RNA, 21 nt, synthetic construct
  source 1..21: mol_type = other RNA
tttggctagtgccacaacaaa

SEQ ID NO: 905 - RNA, 21 nt, synthetic construct
  source 1..21: mol_type = other RNA
gtttggctagtgccacaacaa

SEQ ID NO: 906 - RNA, 21 nt, synthetic construct
  source 1..21: mol_type = other RNA
atgtttggctagtgccacaac

SEQ ID NO: 907 - RNA, 21 nt, synthetic construct
  source 1..21: mol_type = other RNA
tatgtttggctagtgccacaa

SEQ ID NO: 908 - RNA, 21 nt, synthetic construct
  source 1..21: mol_type = other RNA
ttatgtttggctagtgccaca

SEQ ID NO: 909 - RNA, 21 nt, synthetic construct
  source 1..21: mol_type = other RNA
tttatgtttggctagtgccac

SEQ ID NO: 910 - RNA, 21 nt, synthetic construct
  source 1..21: mol_type = other RNA
ctttatgtttggctagtgcca

SEQ ID NO: 911 - RNA, 21 nt, synthetic construct
  source 1..21: mol_type = other RNA
cctttatgtttggctagtgcc

SEQ ID NO: 912 - RNA, 21 nt, synthetic construct
  source 1..21: mol_type = other RNA
ccctttatgtttggctagtgc

SEQ ID NO: 913 - RNA, 21 nt, synthetic construct
  source 1..21: mol_type = other RNA
taagcccctttatgtttggct

SEQ ID NO: 914 - RNA, 21 nt, synthetic construct
  source 1..21: mol_type = other RNA
ttaagcccctttatgtttggc

SEQ ID NO: 915 - RNA, 21 nt, synthetic construct
  source 1..21: mol_type = other RNA
cttaagcccctttatgtttgg

SEQ ID NO: 916 - RNA, 21 nt, synthetic construct
  source 1..21: mol_type = other RNA
acttaagcccctttatgtttg

SEQ ID NO: 917 - RNA, 21 nt, synthetic construct
  source 1..21: mol_type = other RNA
gacttaagcccctttatgttt

SEQ ID NO: 918 - RNA, 21 nt, synthetic construct
  source 1..21: mol_type = other RNA
tgacttaagcccctttatgtt

SEQ ID NO: 919 - RNA, 21 nt, synthetic construct
  source 1..21: mol_type = other RNA
ctgacttaagcccctttatgt

SEQ ID NO: 920 - RNA, 21 nt, synthetic construct
  source 1..21: mol_type = other RNA
ggctgacttaagcccctttat

SEQ ID NO: 921 - RNA, 21 nt, synthetic construct
  source 1..21: mol_type = other RNA
aggctgacttaagccccttta

SEQ ID NO: 922 - RNA, 21 nt, synthetic construct
  source 1..21: mol_type = other RNA
tgcaggctgacttaagcccct

SEQ ID NO: 923 - RNA, 21 nt, synthetic construct
  source 1..21: mol_type = other RNA
cctctgtatgcaggctgactt

SEQ ID NO: 924 - RNA, 21 nt, synthetic construct
  source 1..21: mol_type = other RNA
tcctctgtatgcaggctgact

SEQ ID NO: 925 - RNA, 21 nt, synthetic construct
  source 1..21: mol_type = other RNA
ccgatcctctgtatgcaggct

SEQ ID NO: 926 - RNA, 21 nt, synthetic construct
  source 1..21: mol_type = other RNA
cccgatcctctgtatgcaggc

SEQ ID NO: 927 - RNA, 21 nt, synthetic construct
  source 1..21: mol_type = other RNA
ccccgatcctctgtatgcagg

SEQ ID NO: 928 - RNA, 21 nt, synthetic construct
  source 1..21: mol_type = other RNA
cttctctccccgatcctctgt

SEQ ID NO: 929 - RNA, 21 nt, synthetic construct
  source 1..21: mol_type = other RNA
attaaactctggtaagtactc

SEQ ID NO: 930 - RNA, 21 nt, synthetic construct
  source 1..21: mol_type = other RNA
agtttggggattttagtgcag

SEQ ID NO: 931 - RNA, 21 nt, synthetic construct
  source 1..21: mol_type = other RNA
cagtttggggattttagtgca

SEQ ID NO: 932 - RNA, 21 nt, synthetic construct
  source 1..21: mol_type = other RNA
gtcagtttggggattttagtg

SEQ ID NO: 933 - RNA, 21 nt, synthetic construct
  source 1..21: mol_type = other RNA
ttacctgtcagtttggggatt

SEQ ID NO: 934 - RNA, 21 nt, synthetic construct
  source 1..21: mol_type = other RNA
tacatttacctgtcagtttgg

SEQ ID NO: 935 - RNA, 21 nt, synthetic construct
  source 1..21: mol_type = other RNA
ctacatttacctgtcagtttg

SEQ ID NO: 936 - RNA, 21 nt, synthetic construct
  source 1..21: mol_type = other RNA
gctacatttacctgtcagttt

SEQ ID NO: 937 - RNA, 21 nt, synthetic construct
  source 1..21: mol_type = other RNA
gggctacatttacctgtcagt

SEQ ID NO: 938 - RNA, 21 nt, synthetic construct
  source 1..21: mol_type = other RNA
cgaaaatagtgtgatttagat

SEQ ID NO: 939 - RNA, 21 nt, synthetic construct
  source 1..21: mol_type = other RNA
ctcgaaaatagtgtgatttag

SEQ ID NO: 940 - RNA, 21 nt, synthetic construct
  source 1..21: mol_type = other RNA
tctcgaaaatagtgtgattta

SEQ ID NO: 941 - RNA, 21 nt, synthetic construct
  source 1..21: mol_type = other RNA
gatctcgaaaatagtgtgatt

SEQ ID NO: 942 - RNA, 21 nt, synthetic construct
  source 1..21: mol_type = other RNA
atgatctcgaaaatagtgtga

SEQ ID NO: 943 - RNA, 21 nt, synthetic construct
  source 1..21: mol_type = other RNA
catgatctcgaaaatagtgtg

SEQ ID NO: 944 - RNA, 21 nt, synthetic construct
  source 1..21: mol_type = other RNA
acatgatctcgaaaatagtgt

SEQ ID NO: 945 - RNA, 21 nt, synthetic construct
  source 1..21: mol_type = other RNA
atacatgatctcgaaaatagt

SEQ ID NO: 946 - RNA, 21 nt, synthetic construct
  source 1..21: mol_type = other RNA
tatacatgatctcgaaaatag

SEQ ID NO: 947 - RNA, 21 nt, synthetic construct
  source 1..21: mol_type = other RNA
tttatacatgatctcgaaaat

SEQ ID NO: 948 - RNA, 21 nt, synthetic construct
  source 1..21: mol_type = other RNA
ctttttatacatgatctcgaa

SEQ ID NO: 949 - RNA, 21 nt, synthetic construct
  source 1..21: mol_type = other RNA
acacagcatgacttctttttt

SEQ ID NO: 950 - RNA, 21 nt, synthetic construct
  source 1..21: mol_type = other RNA
attataattggccacacagca

SEQ ID NO: 951 - RNA, 21 nt, synthetic construct
  source 1..21: mol_type = other RNA
tacatttcctggtccctccaa

SEQ ID NO: 952 - RNA, 21 nt, synthetic construct
  source 1..21: mol_type = other RNA
tggtgtcttacatttcctggt

SEQ ID NO: 953 - RNA, 21 nt, synthetic construct
  source 1..21: mol_type = other RNA
ttggtgtcttacatttcctgg

SEQ ID NO: 954 - RNA, 21 nt, synthetic construct
  source 1..21: mol_type = other RNA
atgaggtgacatcaggcacac

SEQ ID NO: 955 - RNA, 21 nt, synthetic construct
  source 1..21: mol_type = other RNA
catgaggtgacatcaggcaca

SEQ ID NO: 956 - RNA, 21 nt, synthetic construct
  source 1..21: mol_type = other RNA
tcatgaggtgacatcaggcac

SEQ ID NO: 957 - RNA, 21 nt, synthetic construct
  source 1..21: mol_type = other RNA
aatcatgaggtgacatcaggc

SEQ ID NO: 958 - RNA, 21 nt, synthetic construct
  source 1..21: mol_type = other RNA
cttggcgcaggagttaaaaaa

SEQ ID NO: 959 - RNA, 21 nt, synthetic construct
  source 1..21: mol_type = other RNA
tgtccttggcgcaggagttaa

SEQ ID NO: 960 - RNA, 21 nt, synthetic construct
  source 1..21: mol_type = other RNA
actgtccttggcgcaggagtt

SEQ ID NO: 961 - RNA, 21 nt, synthetic construct
  source 1..21: mol_type = other RNA
cactgtccttggcgcaggagt

SEQ ID NO: 962 - RNA, 21 nt, synthetic construct
  source 1..21: mol_type = other RNA
cgcaaagcacaaaggtggaca

SEQ ID NO: 963 - RNA, 21 nt, synthetic construct
  source 1..21: mol_type = other RNA
ctcgcaaagcacaaaggtgga

SEQ ID NO: 964 - RNA, 21 nt, synthetic construct
  source 1..21: mol_type = other RNA
gcctcgcaaagcacaaaggtg

SEQ ID NO: 965 - RNA, 21 nt, synthetic construct
  source 1..21: mol_type = other RNA
cggcctcgcaaagcacaaagg

SEQ ID NO: 966 - RNA, 21 nt, synthetic construct
  source 1..21: mol_type = other RNA
ggcgagcagatgcctgggctc

SEQ ID NO: 967 - RNA, 21 nt, synthetic construct
  source 1..21: mol_type = other RNA
gcaggcgagcagatgcctggg

SEQ ID NO: 968 - RNA, 21 nt, synthetic construct
  source 1..21: mol_type = other RNA
tggcaggcgagcagatgcctg

SEQ ID NO: 969 - RNA, 21 nt, synthetic construct
  source 1..21: mol_type = other RNA
ccgtggcaggcgagcagatgc

SEQ ID NO: 970 - RNA, 21 nt, synthetic construct
  source 1..21: mol_type = other RNA
cttctctggtcagccgtggca

SEQ ID NO: 971 - RNA, 21 nt, synthetic construct
  source 1..21: mol_type = other RNA
acgtcgtctaaggcagagctc

SEQ ID NO: 972 - RNA, 21 nt, synthetic construct
  source 1..21: mol_type = other RNA
cacgtcgtctaaggcagagct

SEQ ID NO: 973 - RNA, 21 nt, synthetic construct
  source 1..21: mol_type = other RNA
acacgtcgtctaaggcagagc

SEQ ID NO: 974 - RNA, 21 nt, synthetic construct
  source 1..21: mol_type = other RNA
aacacgtcgtctaaggcagag

SEQ ID NO: 975 - RNA, 21 nt, synthetic construct
  source 1..21: mol_type = other RNA
taacacgtcgtctaaggcaga

SEQ ID NO: 976 - RNA, 21 nt, synthetic construct
  source 1..21: mol_type = other RNA
gtaacacgtcgtctaaggcag

SEQ ID NO: 977 - RNA, 21 nt, synthetic construct
  source 1..21: mol_type = other RNA
ctgtaacacgtcgtctaaggc

SEQ ID NO: 978 - RNA, 21 nt, synthetic construct
  source 1..21: mol_type = other RNA
actgtaacacgtcgtctaagg

SEQ ID NO: 979 - RNA, 21 nt, synthetic construct
  source 1..21: mol_type = other RNA
tactgtaacacgtcgtctaag

SEQ ID NO: 980 - RNA, 21 nt, synthetic construct
  source 1..21: mol_type = other RNA
catactgtaacacgtcgtcta

SEQ ID NO: 981 - RNA, 21 nt, synthetic construct
  source 1..21: mol_type = other RNA
gttcatactgtaacacgtcgt

SEQ ID NO: 982 - RNA, 21 nt, synthetic construct
  source 1..21: mol_type = other RNA
acgagggtgcctctgctgtgt

SEQ ID NO: 983 - RNA, 21 nt, synthetic construct
  source 1..21: mol_type = other RNA
tacgagggtgcctctgctgtg

SEQ ID NO: 984 - RNA, 21 nt, synthetic construct
  source 1..21: mol_type = other RNA
atacgagggtgcctctgctgt

SEQ ID NO: 985 - RNA, 21 nt, synthetic construct
  source 1..21: mol_type = other RNA
catacgagggtgcctctgctg

SEQ ID NO: 986 - RNA, 21 nt, synthetic construct
  source 1..21: mol_type = other RNA
acatacgagggtgcctctgct

SEQ ID NO: 987 - RNA, 21 nt, synthetic construct
  source 1..21: mol_type = other RNA
aacatacgagggtgcctctgc

SEQ ID NO: 988 - RNA, 21 nt, synthetic construct
  source 1..21: mol_type = other RNA
aaacatacgagggtgcctctg

SEQ ID NO: 989 - RNA, 21 nt, synthetic construct
  source 1..21: mol_type = other RNA
aaaacatacgagggtgcctct

SEQ ID NO: 990 - RNA, 21 nt, synthetic construct
  source 1..21: mol_type = other RNA
caaaacatacgagggtgcctc

SEQ ID NO: 991 - RNA, 21 nt, synthetic construct
  source 1..21: mol_type = other RNA
ttcaaaacatacgagggtgcc

SEQ ID NO: 992 - RNA, 21 nt, synthetic construct
  source 1..21: mol_type = other RNA
aactttcaaaacatacgaggg

SEQ ID NO: 993 - RNA, 21 nt, synthetic construct
  source 1..21: mol_type = other RNA
cgggtcagtatagttttacat

SEQ ID NO: 994 - RNA, 21 nt, synthetic construct
  source 1..21: mol_type = other RNA
acgggtcagtatagttttaca

SEQ ID NO: 995 - RNA, 21 nt, synthetic construct
  source 1..21: mol_type = other RNA
aacgggtcagtatagttttac

SEQ ID NO: 996 - RNA, 21 nt, synthetic construct
  source 1..21: mol_type = other RNA
aaacgggtcagtatagtttta

SEQ ID NO: 997 - RNA, 21 nt, synthetic construct
  source 1..21: mol_type = other RNA
ctgaaaacgggtcagtatagt

SEQ ID NO: 998 - RNA, 21 nt, synthetic construct
  source 1..21: mol_type = other RNA
aaactgaaaacgggtcagtat

SEQ ID NO: 999 - RNA, 21 nt, synthetic construct
  source 1..21: mol_type = other RNA
cacgaccctttaaaactgaaa

SEQ ID NO: 1000 - RNA, 21 nt, synthetic construct
  source 1..21: mol_type = other RNA
tcacgaccctttaaaactgaa

SEQ ID NO: 1001 - RNA, 21 nt, synthetic construct
  source 1..21: mol_type = other RNA
ctcacgaccctttaaaactga

SEQ ID NO: 1002 - RNA, 21 nt, synthetic construct
  source 1..21: mol_type = other RNA
tctcacgaccctttaaaactg

SEQ ID NO: 1003 - RNA, 21 nt, synthetic construct
  source 1..21: mol_type = other RNA
tttctcacgaccctttaaaac

SEQ ID NO: 1004 - RNA, 21 nt, synthetic construct
  source 1..21: mol_type = other RNA
gtttctcacgaccctttaaaa

SEQ ID NO: 1005 - RNA, 21 nt, synthetic construct
  source 1..21: mol_type = other RNA
agtttctcacgaccctttaaa

SEQ ID NO: 1006 - RNA, 21 nt, synthetic construct
  source 1..21: mol_type = other RNA
ccagtttctcacgacccttta

SEQ ID NO: 1007 - RNA, 21 nt, synthetic construct
  source 1..21: mol_type = other RNA
gccagtttctcacgacccttt

SEQ ID NO: 1008 - RNA, 21 nt, synthetic construct
  source 1..21: mol_type = other RNA
cattggaccagccagtttctc

SEQ ID NO: 1009 - RNA, 21 nt, synthetic construct
  source 1..21: mol_type = other RNA
gctgtaaatcccattggacca

SEQ ID NO: 1010 - RNA, 21 nt, synthetic construct
  source 1..21: mol_type = other RNA
tgttgctgtaaatcccattgg

SEQ ID NO: 1011 - RNA, 21 nt, synthetic construct
  source 1..21: mol_type = other RNA
acgattaagagcaaacttaaa

SEQ ID NO: 1012 - RNA, 21 nt, synthetic construct
  source 1..21: mol_type = other RNA
tacgattaagagcaaacttaa

SEQ ID NO: 1013 - RNA, 21 nt, synthetic construct
  source 1..21: mol_type = other RNA
ccatacgattaagagcaaact

SEQ ID NO: 1014 - RNA, 21 nt, synthetic construct
  source 1..21: mol_type = other RNA
tccatacgattaagagcaaac

SEQ ID NO: 1015 - RNA, 21 nt, synthetic construct
  source 1..21: mol_type = other RNA
ttccatacgattaagagcaaa

SEQ ID NO: 1016 - RNA, 21 nt, synthetic construct
  source 1..21: mol_type = other RNA
gcttccatacgattaagagca

SEQ ID NO: 1017 - RNA, 21 nt, synthetic construct
  source 1..21: mol_type = other RNA
tcaagcttccatacgattaag

SEQ ID NO: 1018 - RNA, 21 nt, synthetic construct
  source 1..21: mol_type = other RNA
ctcaagcttccatacgattaa

SEQ ID NO: 1019 - RNA, 21 nt, synthetic construct
  source 1..21: mol_type = other RNA
caacacatagctcaagcttcc

SEQ ID NO: 1020 - RNA, 21 nt, synthetic construct
  source 1..21: mol_type = other RNA
ccaacacatagctcaagcttc

SEQ ID NO: 1021 - RNA, 21 nt, synthetic construct
  source 1..21: mol_type = other RNA
ttccaacacatagctcaagct

SEQ ID NO: 1022 - RNA, 21 nt, synthetic construct
  source 1..21: mol_type = other RNA
cttccaacacatagctcaagc

SEQ ID NO: 1023 - RNA, 21 nt, synthetic construct
  source 1..21: mol_type = other RNA
acttccaacacatagctcaag

SEQ ID NO: 1024 - RNA, 21 nt, synthetic construct
  source 1..21: mol_type = other RNA
cacttccaacacatagctcaa

SEQ ID NO: 1025 - RNA, 21 nt, synthetic construct
  source 1..21: mol_type = other RNA
gcacttccaacacatagctca

SEQ ID NO: 1026 - RNA, 21 nt, synthetic construct
  source 1..21: mol_type = other RNA
ggcacttccaacacatagctc

SEQ ID NO: 1027 - RNA, 21 nt, synthetic construct
  source 1..21: mol_type = other RNA
aaaccagggcacttccaacac

SEQ ID NO: 1028 - RNA, 21 nt, synthetic construct
  source 1..21: mol_type = other RNA
gattaaaaccagggcacttcc

SEQ ID NO: 1029 - RNA, 21 nt, synthetic construct
  source 1..21: mol_type = other RNA
ttgtgtatggattaaaaccag

SEQ ID NO: 1030 - RNA, 21 nt, synthetic construct
  source 1..21: mol_type = other RNA
ccgtctttgtgtatggattaa

SEQ ID NO: 1031 - RNA, 21 nt, synthetic construct
  source 1..21: mol_type = other RNA
accgtctttgtgtatggatta

SEQ ID NO: 1032 - RNA, 21 nt, synthetic construct
  source 1..21: mol_type = other RNA
taccgtctttgtgtatggatt

SEQ ID NO: 1033 - RNA, 21 nt, synthetic construct
  source 1..21: mol_type = other RNA
gtaccgtctttgtgtatggat

SEQ ID NO: 1034 - RNA, 21 nt, synthetic construct
  source 1..21: mol_type = other RNA
tgtaccgtctttgtgtatgga

SEQ ID NO: 1035 - RNA, 21 nt, synthetic construct
  source 1..21: mol_type = other RNA
tatgtaccgtctttgtgtatg

SEQ ID NO: 1036 - RNA, 21 nt, synthetic construct
  source 1..21: mol_type = other RNA
attatgtaccgtctttgtgta

SEQ ID NO: 1037 - RNA, 21 nt, synthetic construct
  source 1..21: mol_type = other RNA
gattatgtaccgtctttgtgt

SEQ ID NO: 1038 - RNA, 21 nt, synthetic construct
  source 1..21: mol_type = other RNA
ggattatgtaccgtctttgtg

SEQ ID NO: 1039 - RNA, 21 nt, synthetic construct
  source 1..21: mol_type = other RNA
aggattatgtaccgtctttgt

SEQ ID NO: 1040 - RNA, 21 nt, synthetic construct
  source 1..21: mol_type = other RNA
taggattatgtaccgtctttg

SEQ ID NO: 1041 - RNA, 21 nt, synthetic construct
  source 1..21: mol_type = other RNA
gtaggattatgtaccgtcttt

SEQ ID NO: 1042 - RNA, 21 nt, synthetic construct
  source 1..21: mol_type = other RNA
tgtaggattatgtaccgtctt

SEQ ID NO: 1043 - RNA, 21 nt, synthetic construct
  source 1..21: mol_type = other RNA
taaacctgtaggattatgtac

SEQ ID NO: 1044 - RNA, 21 nt, synthetic construct
  source 1..21: mol_type = other RNA
atttaaacctgtaggattatg

SEQ ID NO: 1045 - RNA, 21 nt, synthetic construct
  source 1..21: mol_type = other RNA
gtacatttaaacctgtaggat

SEQ ID NO: 1046 - RNA, 21 nt, synthetic construct
  source 1..21: mol_type = other RNA
agagcaaagaattccaaacta

SEQ ID NO: 1047 - RNA, 21 nt, synthetic construct
  source 1..21: mol_type = other RNA
tagagcaaagaattccaaact

SEQ ID NO: 1048 - RNA, 21 nt, synthetic construct
  source 1..21: mol_type = other RNA
agtagagcaaagaattccaaa

SEQ ID NO: 1049 - RNA, 21 nt, synthetic construct
  source 1..21: mol_type = other RNA
gcaatgtaaacagtagagcaa

SEQ ID NO: 1050 - RNA, 21 nt, synthetic construct
  source 1..21: mol_type = other RNA
atctgcaatgtaaacagtaga

SEQ ID NO: 1051 - RNA, 21 nt, synthetic construct
  source 1..21: mol_type = other RNA
caatctgcaatgtaaacagta

SEQ ID NO: 1052 - RNA, 21 nt, synthetic construct
  source 1..21: mol_type = other RNA
gcaatctgcaatgtaaacagt

SEQ ID NO: 1053 - RNA, 21 nt, synthetic construct
  source 1..21: mol_type = other RNA
tatagcaatctgcaatgtaaa

SEQ ID NO: 1054 - RNA, 21 nt, synthetic construct
  source 1..21: mol_type = other RNA
ttatagcaatctgcaatgtaa

SEQ ID NO: 1055 - RNA, 21 nt, synthetic construct
  source 1..21: mol_type = other RNA
attatagcaatctgcaatgta

SEQ ID NO: 1056 - RNA, 21 nt, synthetic construct
  source 1..21: mol_type = other RNA
actccttgaaattatagcaat

SEQ ID NO: 1057 - RNA, 21 nt, synthetic construct
  source 1..21: mol_type = other RNA
cactccttgaaattatagcaa

SEQ ID NO: 1058 - RNA, 21 nt, synthetic construct
  source 1..21: mol_type = other RNA
aacatcctaaagtgcatcatt

SEQ ID NO: 1059 - RNA, 21 nt, synthetic construct
  source 1..21: mol_type = other RNA
aaacatcctaaagtgcatcat

SEQ ID NO: 1060 - RNA, 21 nt, synthetic construct
  source 1..21: mol_type = other RNA
ggtcatgtgaatgattcatgt

SEQ ID NO: 1061 - RNA, 21 nt, synthetic construct
  source 1..21: mol_type = other RNA
tggtcatgtgaatgattcatg

SEQ ID NO: 1062 - RNA, 21 nt, synthetic construct
  source 1..21: mol_type = other RNA
ggacagactagacatgtattt

SEQ ID NO: 1063 - RNA, 21 nt, synthetic construct
  source 1..21: mol_type = other RNA
aggacagactagacatgtatt

SEQ ID NO: 1064 - RNA, 21 nt, synthetic construct
  source 1..21: mol_type = other RNA
attaaaggacagactagacat

SEQ ID NO: 1065 - RNA, 21 nt, synthetic construct
  source 1..21: mol_type = other RNA
tattaaaggacagactagaca

SEQ ID NO: 1066 - RNA, 21 nt, synthetic construct
  source 1..21: mol_type = other RNA
gctattaaaggacagactaga

SEQ ID NO: 1067 - RNA, 21 nt, synthetic construct
  source 1..21: mol_type = other RNA
agctattaaaggacagactag

SEQ ID NO: 1068 - RNA, 21 nt, synthetic construct
  source 1..21: mol_type = other RNA
gagctattaaaggacagacta

SEQ ID NO: 1069 - RNA, 21 nt, synthetic construct
  source 1..21: mol_type = other RNA
gagagctattaaaggacagac

SEQ ID NO: 1070 - RNA, 21 nt, synthetic construct
  source 1..21: mol_type = other RNA
ctaactggtaatgatctgatt

SEQ ID NO: 1071 - RNA, 21 nt, synthetic construct
  source 1..21: mol_type = other RNA
agctaactggtaatgatctga

SEQ ID NO: 1072 - RNA, 21 nt, synthetic construct
  source 1..21: mol_type = other RNA
aagctaactggtaatgatctg

SEQ ID NO: 1073 - RNA, 21 nt, synthetic construct
  source 1..21: mol_type = other RNA
aaagctaactggtaatgatct

SEQ ID NO: 1074 - RNA, 21 nt, synthetic construct
  source 1..21: mol_type = other RNA
ttaaaagctaactggtaatga

SEQ ID NO: 1075 - RNA, 21 nt, synthetic construct
  source 1..21: mol_type = other RNA
tttaaaagctaactggtaatg

SEQ ID NO: 1076 - RNA, 21 nt, synthetic construct
  source 1..21: mol_type = other RNA
gtgctttaaaagctaactggt

SEQ ID NO: 1077 - RNA, 21 nt, synthetic construct
  source 1..21: mol_type = other RNA
tagtcttaaacaaatgtgctt

SEQ ID NO: 1078 - RNA, 21 nt, synthetic construct
  source 1..21: mol_type = other RNA
catagtcttaaacaaatgtgc

SEQ ID NO: 1079 - RNA, 21 nt, synthetic construct
  source 1..21: mol_type = other RNA
cgtatttttccaaaaacatag

SEQ ID NO: 1080 - RNA, 21 nt, synthetic construct
  source 1..21: mol_type = other RNA
gtagcgtatttttccaaaaac

SEQ ID NO: 1081 - RNA, 21 nt, synthetic construct
  source 1..21: mol_type = other RNA
ttctgtagcgtatttttccaa

SEQ ID NO: 1082 - RNA, 21 nt, synthetic construct
  source 1..21: mol_type = other RNA
attagtagcatctcatttatt

SEQ ID NO: 1083 - RNA, 21 nt, synthetic construct
  source 1..21: mol_type = other RNA
aaaacaattagtagcatctca

SEQ ID NO: 1084 - RNA, 21 nt, synthetic construct
  source 1..21: mol_type = other RNA
gcagaaacaacagattccaaa

SEQ ID NO: 1085 - RNA, 21 nt, synthetic construct
  source 1..21: mol_type = other RNA
gttaatttacctttggcagaa

SEQ ID NO: 1086 - RNA, 21 nt, synthetic construct
  source 1..21: mol_type = other RNA
agttaatttacctttggcaga

SEQ ID NO: 1087 - RNA, 21 nt, synthetic construct
  source 1..21: mol_type = other RNA
atggggattcctgaataaatc

SEQ ID NO: 1088 - RNA, 21 nt, synthetic construct
  source 1..21: mol_type = other RNA
ttcaaatggggattcctgaat

SEQ ID NO: 1089 - RNA, 21 nt, synthetic construct
  source 1..21: mol_type = other RNA
acaaattcaaatggggattcc

SEQ ID NO: 1090 - RNA, 20 nt, synthetic construct
  source 1..20: mol_type = other RNA
catgtaccccaagtcagcaa

SEQ ID NO: 1091 - RNA, 20 nt, synthetic construct
  source 1..20: mol_type = other RNA
tgtaccccaagtcagcaatg

SEQ ID NO: 1092 - RNA, 20 nt, synthetic construct
  source 1..20: mol_type = other RNA
gtaccccaagtcagcaatgt

SEQ ID NO: 1093 - RNA, 20 nt, synthetic construct
  source 1..20: mol_type = other RNA
gcaatgtgtctgcaaccgga

SEQ ID NO: 1094 - RNA, 20 nt, synthetic construct
  source 1..20: mol_type = other RNA
caatgtgtctgcaaccggag

SEQ ID NO: 1095 - RNA, 20 nt, synthetic construct
  source 1..20: mol_type = other RNA
aatgtgtctgcaaccggaga

SEQ ID NO: 1096 - RNA, 20 nt, synthetic construct
  source 1..20: mol_type = other RNA
tgtgtctgcaaccggagaac

SEQ ID NO: 1097 - RNA, 20 nt, synthetic construct
  source 1..20: mol_type = other RNA
gtgtctgcaaccggagaact

SEQ ID NO: 1098 - RNA, 20 nt, synthetic construct
  source 1..20: mol_type = other RNA
tgtctgcaaccggagaactc

SEQ ID NO: 1099 - RNA, 20 nt, synthetic construct
  source 1..20: mol_type = other RNA
gtctgcaaccggagaactct

SEQ ID NO: 1100 - RNA, 20 nt, synthetic construct
  source 1..20: mol_type = other RNA
tctgcaaccggagaactctt

SEQ ID NO: 1101 - RNA, 20 nt, synthetic construct
  source 1..20: mol_type = other RNA
ctgcaaccggagaactctta

SEQ ID NO: 1102 - RNA, 20 nt, synthetic construct
  source 1..20: mol_type = other RNA
tgcaaccggagaactcttag

SEQ ID NO: 1103 - RNA, 20 nt, synthetic construct
  source 1..20: mol_type = other RNA
gcaaccggagaactcttaga

SEQ ID NO: 1104 - RNA, 20 nt, synthetic construct
  source 1..20: mol_type = other RNA
aaccggagaactcttagaaa

SEQ ID NO: 1105 - RNA, 20 nt, synthetic construct
  source 1..20: mol_type = other RNA
tcttagaaagaaccatccga

SEQ ID NO: 1106 - RNA, 20 nt, synthetic construct
  source 1..20: mol_type = other RNA
cttagaaagaaccatccgat

SEQ ID NO: 1107 - RNA, 20 nt, synthetic construct
  source 1..20: mol_type = other RNA
ttagaaagaaccatccgatc

SEQ ID NO: 1108 - RNA, 20 nt, synthetic construct
  source 1..20: mol_type = other RNA
agaaagaaccatccgatcag

SEQ ID NO: 1109 - RNA, 20 nt, synthetic construct
  source 1..20: mol_type = other RNA
aaagaaccatccgatcagct

SEQ ID NO: 1110 - RNA, 20 nt, synthetic construct
  source 1..20: mol_type = other RNA
aagaaccatccgatcagctg

SEQ ID NO: 1111 - RNA, 20 nt, synthetic construct
  source 1..20: mol_type = other RNA
gaaccatccgatcagctgta

SEQ ID NO: 1112 - RNA, 20 nt, synthetic construct
  source 1..20: mol_type = other RNA
accatccgatcagctgtaga

SEQ ID NO: 1113 - RNA, 20 nt, synthetic construct
  source 1..20: mol_type = other RNA
ccgatcagctgtagaacaac

SEQ ID NO: 1114 - RNA, 20 nt, synthetic construct
  source 1..20: mol_type = other RNA
gatgttaataactctggagg

SEQ ID NO: 1115 - RNA, 20 nt, synthetic construct
  source 1..20: mol_type = other RNA
taataactctggaggtcaaa

SEQ ID NO: 1116 - RNA, 20 nt, synthetic construct
  source 1..20: mol_type = other RNA
ataactctggaggtcaaagt

SEQ ID NO: 1117 - RNA, 20 nt, synthetic construct
  source 1..20: mol_type = other RNA
atctggaacactatcagcat

SEQ ID NO: 1118 - RNA, 20 nt, synthetic construct
  source 1..20: mol_type = other RNA
aggatgaagttcgacatggg

SEQ ID NO: 1119 - RNA, 20 nt, synthetic construct
  source 1..20: mol_type = other RNA
gttcgacatgggagagacaa

SEQ ID NO: 1120 - RNA, 20 nt, synthetic construct
  source 1..20: mol_type = other RNA
cgacatgggagagacaaggg

SEQ ID NO: 1121 - RNA, 20 nt, synthetic construct
  source 1..20: mol_type = other RNA
acatgggagagacaagggac

SEQ ID NO: 1122 - RNA, 20 nt, synthetic construct
  source 1..20: mol_type = other RNA
atgggagagacaagggactt

SEQ ID NO: 1123 - RNA, 20 nt, synthetic construct
  source 1..20: mol_type = other RNA
gggagagacaagggacttat

SEQ ID NO: 1124 - RNA, 20 nt, synthetic construct
  source 1..20: mol_type = other RNA
ggagagacaagggacttatc

SEQ ID NO: 1125 - RNA, 20 nt, synthetic construct
  source 1..20: mol_type = other RNA
gagagacaagggacttatca

SEQ ID NO: 1126 - RNA, 20 nt, synthetic construct
  source 1..20: mol_type = other RNA
gacaagggacttatcaacaa

SEQ ID NO: 1127 - RNA, 20 nt, synthetic construct
  source 1..20: mol_type = other RNA
acaagggacttatcaacaaa

SEQ ID NO: 1128 - RNA, 20 nt, synthetic construct
  source 1..20: mol_type = other RNA
gggacttatcaacaaagaaa

SEQ ID NO: 1129 - RNA, 20 nt, synthetic construct
  source 1..20: mol_type = other RNA
aagaaaatactccttctggg

SEQ ID NO: 1130 - RNA, 20 nt, synthetic construct
  source 1..20: mol_type = other RNA
atactccttctgggttcaac

SEQ ID NO: 1131 - RNA, 20 nt, synthetic construct
  source 1..20: mol_type = other RNA
gttcaaccaccttgatgatt

SEQ ID NO: 1132 - RNA, 20 nt, synthetic construct
  source 1..20: mol_type = other RNA
ttcaaccaccttgatgattg

SEQ ID NO: 1133 - RNA, 20 nt, synthetic construct
  source 1..20: mol_type = other RNA
ttgaatactcaggaagtcga

SEQ ID NO: 1134 - RNA, 20 nt, synthetic construct
  source 1..20: mol_type = other RNA
actcaggaagtcgaaaaggt

SEQ ID NO: 1135 - RNA, 20 nt, synthetic construct
  source 1..20: mol_type = other RNA
ctcaggaagtcgaaaaggta

SEQ ID NO: 1136 - RNA, 20 nt, synthetic construct
  source 1..20: mol_type = other RNA
tcaggaagtcgaaaaggtac

SEQ ID NO: 1137 - RNA, 20 nt, synthetic construct
  source 1..20: mol_type = other RNA
aggaagtcgaaaaggtacac

SEQ ID NO: 1138 - RNA, 20 nt, synthetic construct
  source 1..20: mol_type = other RNA
tcgaaaaggtacacaaaaat

SEQ ID NO: 1139 - RNA, 20 nt, synthetic construct
  source 1..20: mol_type = other RNA
cgaaaaggtacacaaaaata

SEQ ID NO: 1140 - RNA, 20 nt, synthetic construct
  source 1..20: mol_type = other RNA
gagaaaggagcaagcctaaa

SEQ ID NO: 1141 - RNA, 20 nt, synthetic construct
  source 1..20: mol_type = other RNA
agaaaggagcaagcctaaac

SEQ ID NO: 1142 - RNA, 20 nt, synthetic construct
  source 1..20: mol_type = other RNA
gaaaggagcaagcctaaacg

SEQ ID NO: 1143 - RNA, 20 nt, synthetic construct
  source 1..20: mol_type = other RNA
aggagcaagcctaaacgtca

SEQ ID NO: 1144 - RNA, 20 nt, synthetic construct
  source 1..20: mol_type = other RNA
ggagcaagcctaaacgtcag

SEQ ID NO: 1145 - RNA, 20 nt, synthetic construct
  source 1..20: mol_type = other RNA
gagcaagcctaaacgtcaga

SEQ ID NO: 1146 - RNA, 20 nt, synthetic construct
  source 1..20: mol_type = other RNA
agcaagcctaaacgtcagaa

SEQ ID NO: 1147 - RNA, 20 nt, synthetic construct
  source 1..20: mol_type = other RNA
gcaagcctaaacgtcagaaa

SEQ ID NO: 1148 - RNA, 20 nt, synthetic construct
  source 1..20: mol_type = other RNA
caagcctaaacgtcagaaat

SEQ ID NO: 1149 - RNA, 20 nt, synthetic construct
  source 1..20: mol_type = other RNA
aagcctaaacgtcagaaatc

SEQ ID NO: 1150 - RNA, 20 nt, synthetic construct
  source 1..20: mol_type = other RNA
gtcagaaatccagtactaaa

SEQ ID NO: 1151 - RNA, 20 nt, synthetic construct
  source 1..20: mol_type = other RNA
tcagaaatccagtactaaac

SEQ ID NO: 1152 - RNA, 20 nt, synthetic construct
  source 1..20: mol_type = other RNA
tttctgagcttcatgacaat

SEQ ID NO: 1153 - RNA, 20 nt, synthetic construct
  source 1..20: mol_type = other RNA
agcttcatgacaatcaggac

SEQ ID NO: 1154 - RNA, 20 nt, synthetic construct
  source 1..20: mol_type = other RNA
ttcatgacaatcaggacggt

SEQ ID NO: 1155 - RNA, 20 nt, synthetic construct
  source 1..20: mol_type = other RNA
tcatgacaatcaggacggtc

SEQ ID NO: 1156 - RNA, 20 nt, synthetic construct
  source 1..20: mol_type = other RNA
catgacaatcaggacggtct

SEQ ID NO: 1157 - RNA, 20 nt, synthetic construct
  source 1..20: mol_type = other RNA
atgacaatcaggacggtctt

SEQ ID NO: 1158 - RNA, 20 nt, synthetic construct
  source 1..20: mol_type = other RNA
tgacaatcaggacggtcttg

SEQ ID NO: 1159 - RNA, 20 nt, synthetic construct
  source 1..20: mol_type = other RNA
gacaatcaggacggtcttgt

SEQ ID NO: 1160 - RNA, 20 nt, synthetic construct
  source 1..20: mol_type = other RNA
acaatcaggacggtcttgtg

SEQ ID NO: 1161 - RNA, 20 nt, synthetic construct
  source 1..20: mol_type = other RNA
aatcaggacggtcttgtgaa

SEQ ID NO: 1162 - RNA, 20 nt, synthetic construct
  source 1..20: mol_type = other RNA
atcaggacggtcttgtgaat

SEQ ID NO: 1163 - RNA, 20 nt, synthetic construct
  source 1..20: mol_type = other RNA
tcaggacggtcttgtgaata

SEQ ID NO: 1164 - RNA, 20 nt, synthetic construct
  source 1..20: mol_type = other RNA
ggtcttgtgaatatggaaag

SEQ ID NO: 1165 - RNA, 20 nt, synthetic construct
  source 1..20: mol_type = other RNA
gaaagtctcaattccacacg

SEQ ID NO: 1166 - RNA, 20 nt, synthetic construct
  source 1..20: mol_type = other RNA
aaagtctcaattccacacga

SEQ ID NO: 1167 - RNA, 20 nt, synthetic construct
  source 1..20: mol_type = other RNA
aagtctcaattccacacgat

SEQ ID NO: 1168 - RNA, 20 nt, synthetic construct
  source 1..20: mol_type = other RNA
agtctcaattccacacgatc

SEQ ID NO: 1169 - RNA, 20 nt, synthetic construct
  source 1..20: mol_type = other RNA
gtctcaattccacacgatct

SEQ ID NO: 1170 - RNA, 20 nt, synthetic construct
  source 1..20: mol_type = other RNA
tctcaattccacacgatctc

SEQ ID NO: 1171 - RNA, 20 nt, synthetic construct
  source 1..20: mol_type = other RNA
ctcaattccacacgatctca

SEQ ID NO: 1172 - RNA, 20 nt, synthetic construct
  source 1..20: mol_type = other RNA
tcaattccacacgatctcat

SEQ ID NO: 1173 - RNA, 20 nt, synthetic construct
  source 1..20: mol_type = other RNA
caattccacacgatctcatg

SEQ ID NO: 1174 - RNA, 20 nt, synthetic construct
  source 1..20: mol_type = other RNA
attccacacgatctcatgag

SEQ ID NO: 1175 - RNA, 20 nt, synthetic construct
  source 1..20: mol_type = other RNA
ttccacacgatctcatgaga

SEQ ID NO: 1176 - RNA, 20 nt, synthetic construct
  source 1..20: mol_type = other RNA
tccacacgatctcatgagag

SEQ ID NO: 1177 - RNA, 20 nt, synthetic construct
  source 1..20: mol_type = other RNA
cacgatctcatgagagaact

SEQ ID NO: 1178 - RNA, 20 nt, synthetic construct
  source 1..20: mol_type = other RNA
tctcatgagagaactggacc

SEQ ID NO: 1179 - RNA, 20 nt, synthetic construct
  source 1..20: mol_type = other RNA
tcatgagagaactggacctg

SEQ ID NO: 1180 - RNA, 20 nt, synthetic construct
  source 1..20: mol_type = other RNA
catgagagaactggacctga

SEQ ID NO: 1181 - RNA, 20 nt, synthetic construct
  source 1..20: mol_type = other RNA
ttgaatggatgtctgatgaa

SEQ ID NO: 1182 - RNA, 20 nt, synthetic construct
  source 1..20: mol_type = other RNA
ggtggacacactcagcattt

SEQ ID NO: 1183 - RNA, 20 nt, synthetic construct
  source 1..20: mol_type = other RNA
tttgagagccccacaatgaa

SEQ ID NO: 1184 - RNA, 20 nt, synthetic construct
  source 1..20: mol_type = other RNA
atcccagcctatctgacacc

SEQ ID NO: 1185 - RNA, 20 nt, synthetic construct
  source 1..20: mol_type = other RNA
tcccagcctatctgacacca

SEQ ID NO: 1186 - RNA, 20 nt, synthetic construct
  source 1..20: mol_type = other RNA
cccagcctatctgacaccaa

SEQ ID NO: 1187 - RNA, 20 nt, synthetic construct
  source 1..20: mol_type = other RNA
ccagcctatctgacaccaaa

SEQ ID NO: 1188 - RNA, 20 nt, synthetic construct
  source 1..20: mol_type = other RNA
cagcctatctgacaccaaac

SEQ ID NO: 1189 - RNA, 20 nt, synthetic construct
  source 1..20: mol_type = other RNA
agcagagaaatcaagatgcc

SEQ ID NO: 1190 - RNA, 20 nt, synthetic construct
  source 1..20: mol_type = other RNA
gagctttgtctccgaagtgc

SEQ ID NO: 1191 - RNA, 20 nt, synthetic construct
  source 1..20: mol_type = other RNA
tgtctccgaagtgccccagt

SEQ ID NO: 1192 - RNA, 20 nt, synthetic construct
  source 1..20: mol_type = other RNA
ctccgaagtgccccagtcgg

SEQ ID NO: 1193 - RNA, 20 nt, synthetic construct
  source 1..20: mol_type = other RNA
tccgaagtgccccagtcgga

SEQ ID NO: 1194 - RNA, 20 nt, synthetic construct
  source 1..20: mol_type = other RNA
agaactgggaagagcctatc

SEQ ID NO: 1195 - RNA, 20 nt, synthetic construct
  source 1..20: mol_type = other RNA
gaactgggaagagcctatcc

SEQ ID NO: 1196 - RNA, 20 nt, synthetic construct
  source 1..20: mol_type = other RNA
aagagcctatccctgctttc

SEQ ID NO: 1197 - RNA, 20 nt, synthetic construct
  source 1..20: mol_type = other RNA
aggctgggcgcctgatccgt

SEQ ID NO: 1198 - RNA, 20 nt, synthetic construct
  source 1..20: mol_type = other RNA
ggctgggcgcctgatccgtc

SEQ ID NO: 1199 - RNA, 20 nt, synthetic construct
  source 1..20: mol_type = other RNA
gctgggcgcctgatccgtca

SEQ ID NO: 1200 - RNA, 20 nt, synthetic construct
  source 1..20: mol_type = other RNA
ctgggcgcctgatccgtcag

SEQ ID NO: 1201 - RNA, 20 nt, synthetic construct
  source 1..20: mol_type = other RNA
tgggcgcctgatccgtcagc

SEQ ID NO: 1202 - RNA, 20 nt, synthetic construct
  source 1..20: mol_type = other RNA
ctggacgaagacagcgaccc

SEQ ID NO: 1203 - RNA, 20 nt, synthetic construct
  source 1..20: mol_type = other RNA
accccatgctctctcctcgg

SEQ ID NO: 1204 - RNA, 20 nt, synthetic construct
  source 1..20: mol_type = other RNA
catgctctctcctcggttct

SEQ ID NO: 1205 - RNA, 20 nt, synthetic construct
  source 1..20: mol_type = other RNA
atgctctctcctcggttcta

SEQ ID NO: 1206 - RNA, 20 nt, synthetic construct
  source 1..20: mol_type = other RNA
gctctctcctcggttctacg

SEQ ID NO: 1207 - RNA, 20 nt, synthetic construct
  source 1..20: mol_type = other RNA
ctctctcctcggttctacgc

SEQ ID NO: 1208 - RNA, 20 nt, synthetic construct
  source 1..20: mol_type = other RNA
tctctcctcggttctacgct

SEQ ID NO: 1209 - RNA, 20 nt, synthetic construct
  source 1..20: mol_type = other RNA
ctctcctcggttctacgctt

SEQ ID NO: 1210 - RNA, 20 nt, synthetic construct
  source 1..20: mol_type = other RNA
tctcctcggttctacgctta

SEQ ID NO: 1211 - RNA, 20 nt, synthetic construct
  source 1..20: mol_type = other RNA
ctcctcggttctacgcttat

SEQ ID NO: 1212 - RNA, 20 nt, synthetic construct
  source 1..20: mol_type = other RNA
tcctcggttctacgcttatg

SEQ ID NO: 1213 - RNA, 20 nt, synthetic construct
  source 1..20: mol_type = other RNA
cctcggttctacgcttatgg

SEQ ID NO: 1214 - RNA, 20 nt, synthetic construct
  source 1..20: mol_type = other RNA
ctcggttctacgcttatggg

SEQ ID NO: 1215 - RNA, 20 nt, synthetic construct
  source 1..20: mol_type = other RNA
caccaaactcccattctttc

SEQ ID NO: 1216 - RNA, 20 nt, synthetic construct
  source 1..20: mol_type = other RNA
ccaaactcccattctttcat

SEQ ID NO: 1217 - RNA, 20 nt, synthetic construct
  source 1..20: mol_type = other RNA
ctcccattctttcatgaggc

SEQ ID NO: 1218 - RNA, 20 nt, synthetic construct
  source 1..20: mol_type = other RNA
cattctttcatgaggcggcg

SEQ ID NO: 1219 - RNA, 20 nt, synthetic construct
  source 1..20: mol_type = other RNA
attctttcatgaggcggcga

SEQ ID NO: 1220 - RNA, 20 nt, synthetic construct
  source 1..20: mol_type = other RNA
ttctttcatgaggcggcgaa

SEQ ID NO: 1221 - RNA, 20 nt, synthetic construct
  source 1..20: mol_type = other RNA
tctttcatgaggcggcgaag

SEQ ID NO: 1222 - RNA, 20 nt, synthetic construct
  source 1..20: mol_type = other RNA
ctttcatgaggcggcgaagc

SEQ ID NO: 1223 - RNA, 20 nt, synthetic construct
  source 1..20: mol_type = other RNA
tttcatgaggcggcgaagct

SEQ ID NO: 1224 - RNA, 20 nt, synthetic construct
  source 1..20: mol_type = other RNA
tctctggggtcctatgatga

SEQ ID NO: 1225 - RNA, 20 nt, synthetic construct
  source 1..20: mol_type = other RNA
acacctgcccagctcacacg

SEQ ID NO: 1226 - RNA, 20 nt, synthetic construct
  source 1..20: mol_type = other RNA
cacctgcccagctcacacga

SEQ ID NO: 1227 - RNA, 20 nt, synthetic construct
  source 1..20: mol_type = other RNA
cctgcccagctcacacgaag

SEQ ID NO: 1228 - RNA, 20 nt, synthetic construct
  source 1..20: mol_type = other RNA
ccagctcacacgaaggattc

SEQ ID NO: 1229 - RNA, 20 nt, synthetic construct
  source 1..20: mol_type = other RNA
agctcacacgaaggattcag

SEQ ID NO: 1230 - RNA, 20 nt, synthetic construct
  source 1..20: mol_type = other RNA
atccggaagtttgaagatag

SEQ ID NO: 1231 - RNA, 20 nt, synthetic construct
  source 1..20: mol_type = other RNA
cggaagtttgaagatagatt

SEQ ID NO: 1232 - RNA, 20 nt, synthetic construct
  source 1..20: mol_type = other RNA
agtttgaagatagattcgaa

SEQ ID NO: 1233 - RNA, 20 nt, synthetic construct
  source 1..20: mol_type = other RNA
gtttgaagatagattcgaag

SEQ ID NO: 1234 - RNA, 20 nt, synthetic construct
  source 1..20: mol_type = other RNA
gaagatagattcgaagaaga

SEQ ID NO: 1235 - RNA, 20 nt, synthetic construct
  source 1..20: mol_type = other RNA
agaagaagtacagaccttcc

SEQ ID NO: 1236 - RNA, 20 nt, synthetic construct
  source 1..20: mol_type = other RNA
gaagaagtacagaccttccc

SEQ ID NO: 1237 - RNA, 20 nt, synthetic construct
  source 1..20: mol_type = other RNA
aagaagtacagaccttccca

SEQ ID NO: 1238 - RNA, 20 nt, synthetic construct
  source 1..20: mol_type = other RNA
tctgaaatggacaaatgacc

SEQ ID NO: 1239 - RNA, 20 nt, synthetic construct
  source 1..20: mol_type = other RNA
ctgaaatggacaaatgacct

SEQ ID NO: 1240 - RNA, 20 nt, synthetic construct
  source 1..20: mol_type = other RNA
acaaatgaccttgccaaatt

SEQ ID NO: 1241 - RNA, 20 nt, synthetic construct
  source 1..20: mol_type = other RNA
aaatgaccttgccaaattcc

SEQ ID NO: 1242 - RNA, 20 nt, synthetic construct
  source 1..20: mol_type = other RNA
aatgaccttgccaaattccg

SEQ ID NO: 1243 - RNA, 20 nt, synthetic construct
  source 1..20: mol_type = other RNA
tgaccttgccaaattccgga

SEQ ID NO: 1244 - RNA, 20 nt, synthetic construct
  source 1..20: mol_type = other RNA
gaccttgccaaattccggag

SEQ ID NO: 1245 - RNA, 20 nt, synthetic construct
  source 1..20: mol_type = other RNA
accttgccaaattccggaga

SEQ ID NO: 1246 - RNA, 20 nt, synthetic construct
  source 1..20: mol_type = other RNA
ccttgccaaattccggagac

SEQ ID NO: 1247 - RNA, 20 nt, synthetic construct
  source 1..20: mol_type = other RNA
ccggagacaacttaaagaat

SEQ ID NO: 1248 - RNA, 20 nt, synthetic construct
  source 1..20: mol_type = other RNA
cggagacaacttaaagaatc

SEQ ID NO: 1249 - RNA, 20 nt, synthetic construct
  source 1..20: mol_type = other RNA
agatatctgaagaggaccta

SEQ ID NO: 1250 - RNA, 20 nt, synthetic construct
  source 1..20: mol_type = other RNA
gaggacctaactcccaggat

SEQ ID NO: 1251 - RNA, 20 nt, synthetic construct
  source 1..20: mol_type = other RNA
gacctaactcccaggatgcg

SEQ ID NO: 1252 - RNA, 20 nt, synthetic construct
  source 1..20: mol_type = other RNA
acctaactcccaggatgcgg

SEQ ID NO: 1253 - RNA, 20 nt, synthetic construct
  source 1..20: mol_type = other RNA
tgcggcagcgaagcaacaca

SEQ ID NO: 1254 - RNA, 20 nt, synthetic construct
  source 1..20: mol_type = other RNA
gcggcagcgaagcaacacac

SEQ ID NO: 1255 - RNA, 20 nt, synthetic construct
  source 1..20: mol_type = other RNA
cagcgaagcaacacactccc

SEQ ID NO: 1256 - RNA, 20 nt, synthetic construct
  source 1..20: mol_type = other RNA
gcgaagcaacacactcccca

SEQ ID NO: 1257 - RNA, 20 nt, synthetic construct
  source 1..20: mol_type = other RNA
gcaacacactccccaagagt

SEQ ID NO: 1258 - RNA, 20 nt, synthetic construct
  source 1..20: mol_type = other RNA
caagagttttggttcccaac

SEQ ID NO: 1259 - RNA, 20 nt, synthetic construct
  source 1..20: mol_type = other RNA
gagttttggttcccaacttg

SEQ ID NO: 1260 - RNA, 20 nt, synthetic construct
  source 1..20: mol_type = other RNA
gttttggttcccaacttgag

SEQ ID NO: 1261 - RNA, 20 nt, synthetic construct
  source 1..20: mol_type = other RNA
ttgaagccacattggaatct

SEQ ID NO: 1262 - RNA, 20 nt, synthetic construct
  source 1..20: mol_type = other RNA
ccaggagaagcgagcggaaa

SEQ ID NO: 1263 - RNA, 20 nt, synthetic construct
  source 1..20: mol_type = other RNA
gaccagattgctaatgagaa

SEQ ID NO: 1264 - RNA, 20 nt, synthetic construct
  source 1..20: mol_type = other RNA
gctaatgagaaagtggctct

SEQ ID NO: 1265 - RNA, 20 nt, synthetic construct
  source 1..20: mol_type = other RNA
agcattcatggacggccggt

SEQ ID NO: 1266 - RNA, 20 nt, synthetic construct
  source 1..20: mol_type = other RNA
gcattcatggacggccggta

SEQ ID NO: 1267 - RNA, 20 nt, synthetic construct
  source 1..20: mol_type = other RNA
cattcatggacggccggtaa

SEQ ID NO: 1268 - RNA, 20 nt, synthetic construct
  source 1..20: mol_type = other RNA
attcatggacggccggtaac

SEQ ID NO: 1269 - RNA, 20 nt, synthetic construct
  source 1..20: mol_type = other RNA
ttcatggacggccggtaaca

SEQ ID NO: 1270 - RNA, 20 nt, synthetic construct
  source 1..20: mol_type = other RNA
tcatggacggccggtaacaa

SEQ ID NO: 1271 - RNA, 20 nt, synthetic construct
  source 1..20: mol_type = other RNA
atggacggccggtaacaaag

SEQ ID NO: 1272 - RNA, 20 nt, synthetic construct
  source 1..20: mol_type = other RNA
tggacggccggtaacaaaga

SEQ ID NO: 1273 - RNA, 20 nt, synthetic construct
  source 1..20: mol_type = other RNA
ggacggccggtaacaaagaa

SEQ ID NO: 1274 - RNA, 20 nt, synthetic construct
  source 1..20: mol_type = other RNA
acggccggtaacaaagaacg

SEQ ID NO: 1275 - RNA, 20 nt, synthetic construct
  source 1..20: mol_type = other RNA
cggccggtaacaaagaacga

SEQ ID NO: 1276 - RNA, 20 nt, synthetic construct
  source 1..20: mol_type = other RNA
ggccggtaacaaagaacgaa

SEQ ID NO: 1277 - RNA, 20 nt, synthetic construct
  source 1..20: mol_type = other RNA
gccggtaacaaagaacgaac

SEQ ID NO: 1278 - RNA, 20 nt, synthetic construct
  source 1..20: mol_type = other RNA
ccggtaacaaagaacgaacg

SEQ ID NO: 1279 - RNA, 20 nt, synthetic construct
  source 1..20: mol_type = other RNA
cggtaacaaagaacgaacgg

SEQ ID NO: 1280 - RNA, 20 nt, synthetic construct
  source 1..20: mol_type = other RNA
ggtaacaaagaacgaacggc

SEQ ID NO: 1281 - RNA, 20 nt, synthetic construct
  source 1..20: mol_type = other RNA
aaagaacgaacggcaggtga

SEQ ID NO: 1282 - RNA, 20 nt, synthetic construct
  source 1..20: mol_type = other RNA
atgaagccactatacgacag

SEQ ID NO: 1283 - RNA, 20 nt, synthetic construct
  source 1..20: mol_type = other RNA
gaagccactatacgacaggt

SEQ ID NO: 1284 - RNA, 20 nt, synthetic construct
  source 1..20: mol_type = other RNA
aagccactatacgacaggta

SEQ ID NO: 1285 - RNA, 20 nt, synthetic construct
  source 1..20: mol_type = other RNA
agccactatacgacaggtac

SEQ ID NO: 1286 - RNA, 20 nt, synthetic construct
  source 1..20: mol_type = other RNA
gccactatacgacaggtacc

SEQ ID NO: 1287 - RNA, 20 nt, synthetic construct
  source 1..20: mol_type = other RNA
ccactatacgacaggtaccg

SEQ ID NO: 1288 - RNA, 20 nt, synthetic construct
  source 1..20: mol_type = other RNA
cactatacgacaggtaccgg

SEQ ID NO: 1289 - RNA, 20 nt, synthetic construct
  source 1..20: mol_type = other RNA
actatacgacaggtaccggc

SEQ ID NO: 1290 - RNA, 20 nt, synthetic construct
  source 1..20: mol_type = other RNA
aacagatcctctcccgagct

SEQ ID NO: 1291 - RNA, 20 nt, synthetic construct
  source 1..20: mol_type = other RNA
acagatcctctcccgagcta

SEQ ID NO: 1292 - RNA, 20 nt, synthetic construct
  source 1..20: mol_type = other RNA
agatcctctcccgagctaac

SEQ ID NO: 1293 - RNA, 20 nt, synthetic construct
  source 1..20: mol_type = other RNA
tcctctcccgagctaacacc

SEQ ID NO: 1294 - RNA, 20 nt, synthetic construct
  source 1..20: mol_type = other RNA
cctctcccgagctaacacca

SEQ ID NO: 1295 - RNA, 20 nt, synthetic construct
  source 1..20: mol_type = other RNA
ctctcccgagctaacaccat

SEQ ID NO: 1296 - RNA, 20 nt, synthetic construct
  source 1..20: mol_type = other RNA
tcccgagctaacaccatacc

SEQ ID NO: 1297 - RNA, 20 nt, synthetic construct
  source 1..20: mol_type = other RNA
cccgagctaacaccataccc

SEQ ID NO: 1298 - RNA, 20 nt, synthetic construct
  source 1..20: mol_type = other RNA
ggggtcagaagacgatagca

SEQ ID NO: 1299 - RNA, 20 nt, synthetic construct
  source 1..20: mol_type = other RNA
gggtcagaagacgatagcaa

SEQ ID NO: 1300 - RNA, 20 nt, synthetic construct
  source 1..20: mol_type = other RNA
gtcagaagacgatagcaatg

SEQ ID NO: 1301 - RNA, 20 nt, synthetic construct
  source 1..20: mol_type = other RNA
tcagaagacgatagcaatgt

SEQ ID NO: 1302 - RNA, 20 nt, synthetic construct
  source 1..20: mol_type = other RNA
gaagacgatagcaatgtgaa

SEQ ID NO: 1303 - RNA, 20 nt, synthetic construct
  source 1..20: mol_type = other RNA
agacgatagcaatgtgaagc

SEQ ID NO: 1304 - RNA, 20 nt, synthetic construct
  source 1..20: mol_type = other RNA
atggtcactctgaaaaccga

SEQ ID NO: 1305 - RNA, 20 nt, synthetic construct
  source 1..20: mol_type = other RNA
tggtcactctgaaaaccgat

SEQ ID NO: 1306 - RNA, 20 nt, synthetic construct
  source 1..20: mol_type = other RNA
ggtcactctgaaaaccgatt

SEQ ID NO: 1307 - RNA, 20 nt, synthetic construct
  source 1..20: mol_type = other RNA
gaaaaccgatttcagtgcac

SEQ ID NO: 1308 - RNA, 20 nt, synthetic construct
  source 1..20: mol_type = other RNA
aaccgatttcagtgcacgat

SEQ ID NO: 1309 - RNA, 20 nt, synthetic construct
  source 1..20: mol_type = other RNA
tatttccccaatggatgata

SEQ ID NO: 1310 - RNA, 20 nt, synthetic construct
  source 1..20: mol_type = other RNA
cccaatggatgataaaatac

SEQ ID NO: 1311 - RNA, 20 nt, synthetic construct
  source 1..20: mol_type = other RNA
caatggatgataaaatacca

SEQ ID NO: 1312 - RNA, 20 nt, synthetic construct
  source 1..20: mol_type = other RNA
tggatgataaaataccatca

SEQ ID NO: 1313 - RNA, 20 nt, synthetic construct
  source 1..20: mol_type = other RNA
aaataccatcaaaatgcagc

SEQ ID NO: 1314 - RNA, 20 nt, synthetic construct
  source 1..20: mol_type = other RNA
gggctttcaaatctccatgc

SEQ ID NO: 1315 - RNA, 20 nt, synthetic construct
  source 1..20: mol_type = other RNA
ggctttcaaatctccatgct

SEQ ID NO: 1316 - RNA, 20 nt, synthetic construct
  source 1..20: mol_type = other RNA
aatctccatgctgcctcaat

SEQ ID NO: 1317 - RNA, 20 nt, synthetic construct
  source 1..20: mol_type = other RNA
atctccatgctgcctcaata

SEQ ID NO: 1318 - RNA, 20 nt, synthetic construct
  source 1..20: mol_type = other RNA
tctccatgctgcctcaatac

SEQ ID NO: 1319 - RNA, 20 nt, synthetic construct
  source 1..20: mol_type = other RNA
ctgcctcaatacctgaactc

SEQ ID NO: 1320 - RNA, 20 nt, synthetic construct
  source 1..20: mol_type = other RNA
ctggaacacctccaggaaat

SEQ ID NO: 1321 - RNA, 20 nt, synthetic construct
  source 1..20: mol_type = other RNA
cttcgggattttgaagacaa

SEQ ID NO: 1322 - RNA, 20 nt, synthetic construct
  source 1..20: mol_type = other RNA
ccagaaggaagaccgcactc

SEQ ID NO: 1323 - RNA, 20 nt, synthetic construct
  source 1..20: mol_type = other RNA
gaaggaagaccgcactccta

SEQ ID NO: 1324 - RNA, 20 nt, synthetic construct
  source 1..20: mol_type = other RNA
aaggaagaccgcactcctat

SEQ ID NO: 1325 - RNA, 20 nt, synthetic construct
  source 1..20: mol_type = other RNA
aggaagaccgcactcctatg

SEQ ID NO: 1326 - RNA, 20 nt, synthetic construct
  source 1..20: mol_type = other RNA
ggaagaccgcactcctatgg

SEQ ID NO: 1327 - RNA, 20 nt, synthetic construct
  source 1..20: mol_type = other RNA
gaagaccgcactcctatggc

SEQ ID NO: 1328 - RNA, 20 nt, synthetic construct
  source 1..20: mol_type = other RNA
agaccgcactcctatggctg

SEQ ID NO: 1329 - RNA, 20 nt, synthetic construct
  source 1..20: mol_type = other RNA
ccgcactcctatggctgaag

SEQ ID NO: 1330 - RNA, 20 nt, synthetic construct
  source 1..20: mol_type = other RNA
taagcacataaaggcgaaac

SEQ ID NO: 1331 - RNA, 20 nt, synthetic construct
  source 1..20: mol_type = other RNA
aagcacataaaggcgaaact

SEQ ID NO: 1332 - RNA, 20 nt, synthetic construct
  source 1..20: mol_type = other RNA
gcacataaaggcgaaactga

SEQ ID NO: 1333 - RNA, 20 nt, synthetic construct
  source 1..20: mol_type = other RNA
gattccaagtccatgtgagg

SEQ ID NO: 1334 - RNA, 20 nt, synthetic construct
  source 1..20: mol_type = other RNA
attccaagtccatgtgaggg

SEQ ID NO: 1335 - RNA, 20 nt, synthetic construct
  source 1..20: mol_type = other RNA
ccaagtccatgtgaggggca

SEQ ID NO: 1336 - RNA, 20 nt, synthetic construct
  source 1..20: mol_type = other RNA
caagtccatgtgaggggcat

SEQ ID NO: 1337 - RNA, 20 nt, synthetic construct
  source 1..20: mol_type = other RNA
gtccatgtgaggggcatggc

SEQ ID NO: 1338 - RNA, 20 nt, synthetic construct
  source 1..20: mol_type = other RNA
gcagctgcggtgagagttta

SEQ ID NO: 1339 - RNA, 20 nt, synthetic construct
  source 1..20: mol_type = other RNA
agctgcggtgagagtttact

SEQ ID NO: 1340 - RNA, 20 nt, synthetic construct
  source 1..20: mol_type = other RNA
cccagagaaagtgcagctct

SEQ ID NO: 1341 - RNA, 20 nt, synthetic construct
  source 1..20: mol_type = other RNA
caaagcatgcagcccttctg

SEQ ID NO: 1342 - RNA, 20 nt, synthetic construct
  source 1..20: mol_type = other RNA
ccttctgcctctagaccatt

SEQ ID NO: 1343 - RNA, 20 nt, synthetic construct
  source 1..20: mol_type = other RNA
tctgcctctagaccatttgg

SEQ ID NO: 1344 - RNA, 20 nt, synthetic construct
  source 1..20: mol_type = other RNA
tctagaccatttggcatcgg

SEQ ID NO: 1345 - RNA, 20 nt, synthetic construct
  source 1..20: mol_type = other RNA
ctagaccatttggcatcggc

SEQ ID NO: 1346 - RNA, 20 nt, synthetic construct
  source 1..20: mol_type = other RNA
tagaccatttggcatcggct

SEQ ID NO: 1347 - RNA, 20 nt, synthetic construct
  source 1..20: mol_type = other RNA
agaccatttggcatcggctc

SEQ ID NO: 1348 - RNA, 20 nt, synthetic construct
  source 1..20: mol_type = other RNA
tttggcatcggctcctgttt

SEQ ID NO: 1349 - RNA, 20 nt, synthetic construct
  source 1..20: mol_type = other RNA
ggcatcggctcctgtttcca

SEQ ID NO: 1350 - RNA, 20 nt, synthetic construct
  source 1..20: mol_type = other RNA
tcggctcctgtttccattgc

SEQ ID NO: 1351 - RNA, 20 nt, synthetic construct
  source 1..20: mol_type = other RNA
ggctcctgtttccattgcct

SEQ ID NO: 1352 - RNA, 20 nt, synthetic construct
  source 1..20: mol_type = other RNA
taggcattttgtaattggaa

SEQ ID NO: 1353 - RNA, 20 nt, synthetic construct
  source 1..20: mol_type = other RNA
aggcattttgtaattggaaa

SEQ ID NO: 1354 - RNA, 20 nt, synthetic construct
  source 1..20: mol_type = other RNA
attttgtaattggaaagtca

SEQ ID NO: 1355 - RNA, 20 nt, synthetic construct
  source 1..20: mol_type = other RNA
tttgtaattggaaagtcaag

SEQ ID NO: 1356 - RNA, 20 nt, synthetic construct
  source 1..20: mol_type = other RNA
aattggaaagtcaagactgc

SEQ ID NO: 1357 - RNA, 20 nt, synthetic construct
  source 1..20: mol_type = other RNA
ggaaagtcaagactgcagta

SEQ ID NO: 1358 - RNA, 20 nt, synthetic construct
  source 1..20: mol_type = other RNA
gtcaagactgcagtatgtgc

SEQ ID NO: 1359 - RNA, 20 nt, synthetic construct
  source 1..20: mol_type = other RNA
tcaagactgcagtatgtgca

SEQ ID NO: 1360 - RNA, 20 nt, synthetic construct
  source 1..20: mol_type = other RNA
acacacacagtagtggagct

SEQ ID NO: 1361 - RNA, 20 nt, synthetic construct
  source 1..20: mol_type = other RNA
cacacagtagtggagctttc

SEQ ID NO: 1362 - RNA, 20 nt, synthetic construct
  source 1..20: mol_type = other RNA
acacagtagtggagctttcc

SEQ ID NO: 1363 - RNA, 20 nt, synthetic construct
  source 1..20: mol_type = other RNA
gctttcctaacactagcaga

SEQ ID NO: 1364 - RNA, 20 nt, synthetic construct
  source 1..20: mol_type = other RNA
taacactagcagagattaat

SEQ ID NO: 1365 - RNA, 20 nt, synthetic construct
  source 1..20: mol_type = other RNA
aacactagcagagattaatc

SEQ ID NO: 1366 - RNA, 20 nt, synthetic construct
  source 1..20: mol_type = other RNA
acactagcagagattaatca

SEQ ID NO: 1367 - RNA, 20 nt, synthetic construct
  source 1..20: mol_type = other RNA
ctagcagagattaatcacta

SEQ ID NO: 1368 - RNA, 20 nt, synthetic construct
  source 1..20: mol_type = other RNA
agagattaatcactacatta

SEQ ID NO: 1369 - RNA, 20 nt, synthetic construct
  source 1..20: mol_type = other RNA
ctacattagacaacactcat

SEQ ID NO: 1370 - RNA, 20 nt, synthetic construct
  source 1..20: mol_type = other RNA
tacattagacaacactcatc

SEQ ID NO: 1371 - RNA, 20 nt, synthetic construct
  source 1..20: mol_type = other RNA
cattagacaacactcatcta

SEQ ID NO: 1372 - RNA, 20 nt, synthetic construct
  source 1..20: mol_type = other RNA
ggataactgagaaacaagag

SEQ ID NO: 1373 - RNA, 20 nt, synthetic construct
  source 1..20: mol_type = other RNA
gagaccattctctgtctaac

SEQ ID NO: 1374 - RNA, 20 nt, synthetic construct
  source 1..20: mol_type = other RNA
ctgtctaactgtgataaaaa

SEQ ID NO: 1375 - RNA, 20 nt, synthetic construct
  source 1..20: mol_type = other RNA
tcaggactttattctataga

SEQ ID NO: 1376 - RNA, 20 nt, synthetic construct
  source 1..20: mol_type = other RNA
actttattctatagagcaaa

SEQ ID NO: 1377 - RNA, 20 nt, synthetic construct
  source 1..20: mol_type = other RNA
ttattctatagagcaaactt

SEQ ID NO: 1378 - RNA, 20 nt, synthetic construct
  source 1..20: mol_type = other RNA
tattctatagagcaaacttg

SEQ ID NO: 1379 - RNA, 20 nt, synthetic construct
  source 1..20: mol_type = other RNA
ttctatagagcaaacttgct

SEQ ID NO: 1380 - RNA, 20 nt, synthetic construct
  source 1..20: mol_type = other RNA
ctgtggagggccatgctctc

SEQ ID NO: 1381 - RNA, 20 nt, synthetic construct
  source 1..20: mol_type = other RNA
gctctccttggacccagtta

SEQ ID NO: 1382 - RNA, 20 nt, synthetic construct
  source 1..20: mol_type = other RNA
tctccttggacccagttaac

SEQ ID NO: 1383 - RNA, 20 nt, synthetic construct
  source 1..20: mol_type = other RNA
ctccttggacccagttaact

SEQ ID NO: 1384 - RNA, 20 nt, synthetic construct
  source 1..20: mol_type = other RNA
ccttggacccagttaactgc

SEQ ID NO: 1385 - RNA, 20 nt, synthetic construct
  source 1..20: mol_type = other RNA
cttggacccagttaactgca

SEQ ID NO: 1386 - RNA, 20 nt, synthetic construct
  source 1..20: mol_type = other RNA
ggacccagttaactgcaaac

SEQ ID NO: 1387 - RNA, 20 nt, synthetic construct
  source 1..20: mol_type = other RNA
gacccagttaactgcaaacg

SEQ ID NO: 1388 - RNA, 20 nt, synthetic construct
  source 1..20: mol_type = other RNA
acccagttaactgcaaacgt

SEQ ID NO: 1389 - RNA, 20 nt, synthetic construct
  source 1..20: mol_type = other RNA
cccagttaactgcaaacgtg

SEQ ID NO: 1390 - RNA, 20 nt, synthetic construct
  source 1..20: mol_type = other RNA
ccagttaactgcaaacgtgc

SEQ ID NO: 1391 - RNA, 20 nt, synthetic construct
  source 1..20: mol_type = other RNA
cagttaactgcaaacgtgca

SEQ ID NO: 1392 - RNA, 20 nt, synthetic construct
  source 1..20: mol_type = other RNA
ttaactgcaaacgtgcattg

SEQ ID NO: 1393 - RNA, 20 nt, synthetic construct
  source 1..20: mol_type = other RNA
ctgcaaacgtgcattggagc

SEQ ID NO: 1394 - RNA, 20 nt, synthetic construct
  source 1..20: mol_type = other RNA
tgcaaacgtgcattggagcc

SEQ ID NO: 1395 - RNA, 20 nt, synthetic construct
  source 1..20: mol_type = other RNA
aacgtgcattggagccctat

SEQ ID NO: 1396 - RNA, 20 nt, synthetic construct
  source 1..20: mol_type = other RNA
acgtgcattggagccctatt

SEQ ID NO: 1397 - RNA, 20 nt, synthetic construct
  source 1..20: mol_type = other RNA
gtgcattggagccctatttg

SEQ ID NO: 1398 - RNA, 20 nt, synthetic construct
  source 1..20: mol_type = other RNA
tgcattggagccctatttgc

SEQ ID NO: 1399 - RNA, 20 nt, synthetic construct
  source 1..20: mol_type = other RNA
tggagccctatttgctgccg

SEQ ID NO: 1400 - RNA, 20 nt, synthetic construct
  source 1..20: mol_type = other RNA
ggagccctatttgctgccgc

SEQ ID NO: 1401 - RNA, 20 nt, synthetic construct
  source 1..20: mol_type = other RNA
gagccctatttgctgccgct

SEQ ID NO: 1402 - RNA, 20 nt, synthetic construct
  source 1..20: mol_type = other RNA
agccctatttgctgccgctg

SEQ ID NO: 1403 - RNA, 20 nt, synthetic construct
  source 1..20: mol_type = other RNA
ccgctgccattctagtgacc

SEQ ID NO: 1404 - RNA, 20 nt, synthetic construct
  source 1..20: mol_type = other RNA
tgccattctagtgacctttc

SEQ ID NO: 1405 - RNA, 20 nt, synthetic construct
  source 1..20: mol_type = other RNA
gccattctagtgacctttcc

SEQ ID NO: 1406 - RNA, 20 nt, synthetic construct
  source 1..20: mol_type = other RNA
ctagtgacctttccacagag

SEQ ID NO: 1407 - RNA, 20 nt, synthetic construct
  source 1..20: mol_type = other RNA
agagctgcgccttcctcacg

SEQ ID NO: 1408 - RNA, 20 nt, synthetic construct
  source 1..20: mol_type = other RNA
gcgccttcctcacgtgtgtg

SEQ ID NO: 1409 - RNA, 20 nt, synthetic construct
  source 1..20: mol_type = other RNA
cctcacgtgtgtgaaaggtt

SEQ ID NO: 1410 - RNA, 20 nt, synthetic construct
  source 1..20: mol_type = other RNA
ctcacgtgtgtgaaaggttt

SEQ ID NO: 1411 - RNA, 20 nt, synthetic construct
  source 1..20: mol_type = other RNA
ttcagccctcaggtagatgg

SEQ ID NO: 1412 - RNA, 20 nt, synthetic construct
  source 1..20: mol_type = other RNA
tcagccctcaggtagatgga

SEQ ID NO: 1413 - RNA, 20 nt, synthetic construct
  source 1..20: mol_type = other RNA
agccctcaggtagatggaag

SEQ ID NO: 1414 - RNA, 20 nt, synthetic construct
  source 1..20: mol_type = other RNA
tcaggatgtttcttcaggac

SEQ ID NO: 1415 - RNA, 20 nt, synthetic construct
  source 1..20: mol_type = other RNA
ttcctcagctgacaaggaat

SEQ ID NO: 1416 - RNA, 20 nt, synthetic construct
  source 1..20: mol_type = other RNA
agctgacaaggaattttggt

SEQ ID NO: 1417 - RNA, 20 nt, synthetic construct
  source 1..20: mol_type = other RNA
gaattttggtccctgcctag

SEQ ID NO: 1418 - RNA, 20 nt, synthetic construct
  source 1..20: mol_type = other RNA
aattttggtccctgcctagg

SEQ ID NO: 1419 - RNA, 20 nt, synthetic construct
  source 1..20: mol_type = other RNA
tttggtccctgcctaggacc

SEQ ID NO: 1420 - RNA, 20 nt, synthetic construct
  source 1..20: mol_type = other RNA
ctgcctaggaccgggtcatc

SEQ ID NO: 1421 - RNA, 20 nt, synthetic construct
  source 1..20: mol_type = other RNA
acagagagatggtaagcagc

SEQ ID NO: 1422 - RNA, 20 nt, synthetic construct
  source 1..20: mol_type = other RNA
gagagatggtaagcagctgt

SEQ ID NO: 1423 - RNA, 20 nt, synthetic construct
  source 1..20: mol_type = other RNA
agagatggtaagcagctgta

SEQ ID NO: 1424 - RNA, 20 nt, synthetic construct
  source 1..20: mol_type = other RNA
gagatggtaagcagctgtat

SEQ ID NO: 1425 - RNA, 20 nt, synthetic construct
  source 1..20: mol_type = other RNA
gtaagcagctgtatgaatgc

SEQ ID NO: 1426 - RNA, 20 nt, synthetic construct
  source 1..20: mol_type = other RNA
agcagctgtatgaatgctga

SEQ ID NO: 1427 - RNA, 20 nt, synthetic construct
  source 1..20: mol_type = other RNA
gattttaaaaccaggtcatg

SEQ ID NO: 1428 - RNA, 20 nt, synthetic construct
  source 1..20: mol_type = other RNA
ttttaaaaccaggtcatggg

SEQ ID NO: 1429 - RNA, 20 nt, synthetic construct
  source 1..20: mol_type = other RNA
ctgaacactgactgcactta

SEQ ID NO: 1430 - RNA, 20 nt, synthetic construct
  source 1..20: mol_type = other RNA
tgaacactgactgcacttac

SEQ ID NO: 1431 - RNA, 20 nt, synthetic construct
  source 1..20: mol_type = other RNA
cacttaccagtctgatttta

SEQ ID NO: 1432 - RNA, 20 nt, synthetic construct
  source 1..20: mol_type = other RNA
accagtctgattttatcgtc

SEQ ID NO: 1433 - RNA, 20 nt, synthetic construct
  source 1..20: mol_type = other RNA
ccagtctgattttatcgtca

SEQ ID NO: 1434 - RNA, 20 nt, synthetic construct
  source 1..20: mol_type = other RNA
tctgattttatcgtcaaaca

SEQ ID NO: 1435 - RNA, 20 nt, synthetic construct
  source 1..20: mol_type = other RNA
ctgattttatcgtcaaacac

SEQ ID NO: 1436 - RNA, 20 nt, synthetic construct
  source 1..20: mol_type = other RNA
tgattttatcgtcaaacacc

SEQ ID NO: 1437 - RNA, 20 nt, synthetic construct
  source 1..20: mol_type = other RNA
gattttatcgtcaaacacca

SEQ ID NO: 1438 - RNA, 20 nt, synthetic construct
  source 1..20: mol_type = other RNA
attttatcgtcaaacaccaa

SEQ ID NO: 1439 - RNA, 20 nt, synthetic construct
  source 1..20: mol_type = other RNA
ttatcgtcaaacaccaagcc

SEQ ID NO: 1440 - RNA, 20 nt, synthetic construct
  source 1..20: mol_type = other RNA
tatcgtcaaacaccaagcca

SEQ ID NO: 1441 - RNA, 20 nt, synthetic construct
  source 1..20: mol_type = other RNA
catgctcatggcaatctgtt

SEQ ID NO: 1442 - RNA, 20 nt, synthetic construct
  source 1..20: mol_type = other RNA
tcatggcaatctgtttgggg

SEQ ID NO: 1443 - RNA, 20 nt, synthetic construct
  source 1..20: mol_type = other RNA
gttttgttgtggcactagcc

SEQ ID NO: 1444 - RNA, 20 nt, synthetic construct
  source 1..20: mol_type = other RNA
ttttgttgtggcactagcca

SEQ ID NO: 1445 - RNA, 20 nt, synthetic construct
  source 1..20: mol_type = other RNA
tttgttgtggcactagccaa

SEQ ID NO: 1446 - RNA, 20 nt, synthetic construct
  source 1..20: mol_type = other RNA
ttgttgtggcactagccaaa

SEQ ID NO: 1447 - RNA, 20 nt, synthetic construct
  source 1..20: mol_type = other RNA
gttgtggcactagccaaaca

SEQ ID NO: 1448 - RNA, 20 nt, synthetic construct
  source 1..20: mol_type = other RNA
ttgtggcactagccaaacat

SEQ ID NO: 1449 - RNA, 20 nt, synthetic construct
  source 1..20: mol_type = other RNA
tgtggcactagccaaacata

SEQ ID NO: 1450 - RNA, 20 nt, synthetic construct
  source 1..20: mol_type = other RNA
gtggcactagccaaacataa

SEQ ID NO: 1451 - RNA, 20 nt, synthetic construct
  source 1..20: mol_type = other RNA
tggcactagccaaacataaa

SEQ ID NO: 1452 - RNA, 20 nt, synthetic construct
  source 1..20: mol_type = other RNA
ggcactagccaaacataaag

SEQ ID NO: 1453 - RNA, 20 nt, synthetic construct
  source 1..20: mol_type = other RNA
gcactagccaaacataaagg

SEQ ID NO: 1454 - RNA, 20 nt, synthetic construct
  source 1..20: mol_type = other RNA
agccaaacataaaggggctt

SEQ ID NO: 1455 - RNA, 20 nt, synthetic construct
  source 1..20: mol_type = other RNA
gccaaacataaaggggctta

SEQ ID NO: 1456 - RNA, 20 nt, synthetic construct
  source 1..20: mol_type = other RNA
ccaaacataaaggggcttaa

SEQ ID NO: 1457 - RNA, 20 nt, synthetic construct
  source 1..20: mol_type = other RNA
caaacataaaggggcttaag

SEQ ID NO: 1458 - RNA, 20 nt, synthetic construct
  source 1..20: mol_type = other RNA
aaacataaaggggcttaagt

SEQ ID NO: 1459 - RNA, 20 nt, synthetic construct
  source 1..20: mol_type = other RNA
aacataaaggggcttaagtc

SEQ ID NO: 1460 - RNA, 20 nt, synthetic construct
  source 1..20: mol_type = other RNA
acataaaggggcttaagtca

SEQ ID NO: 1461 - RNA, 20 nt, synthetic construct
  source 1..20: mol_type = other RNA
ataaaggggcttaagtcagc

SEQ ID NO: 1462 - RNA, 20 nt, synthetic construct
  source 1..20: mol_type = other RNA
taaaggggcttaagtcagcc

SEQ ID NO: 1463 - RNA, 20 nt, synthetic construct
  source 1..20: mol_type = other RNA
aggggcttaagtcagcctgc

SEQ ID NO: 1464 - RNA, 20 nt, synthetic construct
  source 1..20: mol_type = other RNA
aagtcagcctgcatacagag

SEQ ID NO: 1465 - RNA, 20 nt, synthetic construct
  source 1..20: mol_type = other RNA
agtcagcctgcatacagagg

SEQ ID NO: 1466 - RNA, 20 nt, synthetic construct
  source 1..20: mol_type = other RNA
agcctgcatacagaggatcg

SEQ ID NO: 1467 - RNA, 20 nt, synthetic construct
  source 1..20: mol_type = other RNA
gcctgcatacagaggatcgg

SEQ ID NO: 1468 - RNA, 20 nt, synthetic construct
  source 1..20: mol_type = other RNA
cctgcatacagaggatcggg

SEQ ID NO: 1469 - RNA, 20 nt, synthetic construct
  source 1..20: mol_type = other RNA
acagaggatcggggagagaa

SEQ ID NO: 1470 - RNA, 20 nt, synthetic construct
  source 1..20: mol_type = other RNA
gagtacttaccagagtttaa

SEQ ID NO: 1471 - RNA, 20 nt, synthetic construct
  source 1..20: mol_type = other RNA
ctgcactaaaatccccaaac

SEQ ID NO: 1472 - RNA, 20 nt, synthetic construct
  source 1..20: mol_type = other RNA
tgcactaaaatccccaaact

SEQ ID NO: 1473 - RNA, 20 nt, synthetic construct
  source 1..20: mol_type = other RNA
cactaaaatccccaaactga

SEQ ID NO: 1474 - RNA, 20 nt, synthetic construct
  source 1..20: mol_type = other RNA
aatccccaaactgacaggta

SEQ ID NO: 1475 - RNA, 20 nt, synthetic construct
  source 1..20: mol_type = other RNA
ccaaactgacaggtaaatgt

SEQ ID NO: 1476 - RNA, 20 nt, synthetic construct
  source 1..20: mol_type = other RNA
caaactgacaggtaaatgta

SEQ ID NO: 1477 - RNA, 20 nt, synthetic construct
  source 1..20: mol_type = other RNA
aaactgacaggtaaatgtag

SEQ ID NO: 1478 - RNA, 20 nt, synthetic construct
  source 1..20: mol_type = other RNA
actgacaggtaaatgtagcc

SEQ ID NO: 1479 - RNA, 20 nt, synthetic construct
  source 1..20: mol_type = other RNA
atctaaatcacactattttc

SEQ ID NO: 1480 - RNA, 20 nt, synthetic construct
  source 1..20: mol_type = other RNA
ctaaatcacactattttcga

SEQ ID NO: 1481 - RNA, 20 nt, synthetic construct
  source 1..20: mol_type = other RNA
taaatcacactattttcgag

SEQ ID NO: 1482 - RNA, 20 nt, synthetic construct
  source 1..20: mol_type = other RNA
aatcacactattttcgagat

SEQ ID NO: 1483 - RNA, 20 nt, synthetic construct
  source 1..20: mol_type = other RNA
tcacactattttcgagatca

SEQ ID NO: 1484 - RNA, 20 nt, synthetic construct
  source 1..20: mol_type = other RNA
cacactattttcgagatcat

SEQ ID NO: 1485 - RNA, 20 nt, synthetic construct
  source 1..20: mol_type = other RNA
acactattttcgagatcatg

SEQ ID NO: 1486 - RNA, 20 nt, synthetic construct
  source 1..20: mol_type = other RNA
actattttcgagatcatgta

SEQ ID NO: 1487 - RNA, 20 nt, synthetic construct
  source 1..20: mol_type = other RNA
ctattttcgagatcatgtat

SEQ ID NO: 1488 - RNA, 20 nt, synthetic construct
  source 1..20: mol_type = other RNA
attttcgagatcatgtataa

SEQ ID NO: 1489 - RNA, 20 nt, synthetic construct
  source 1..20: mol_type = other RNA
ttcgagatcatgtataaaaa

SEQ ID NO: 1490 - RNA, 20 nt, synthetic construct
  source 1..20: mol_type = other RNA
aaaaaagaagtcatgctgtg

SEQ ID NO: 1491 - RNA, 20 nt, synthetic construct
  source 1..20: mol_type = other RNA
tgctgtgtggccaattataa

SEQ ID NO: 1492 - RNA, 20 nt, synthetic construct
  source 1..20: mol_type = other RNA
ttggagggaccaggaaatgt

SEQ ID NO: 1493 - RNA, 20 nt, synthetic construct
  source 1..20: mol_type = other RNA
accaggaaatgtaagacacc

SEQ ID NO: 1494 - RNA, 20 nt, synthetic construct
  source 1..20: mol_type = other RNA
ccaggaaatgtaagacacca

SEQ ID NO: 1495 - RNA, 20 nt, synthetic construct
  source 1..20: mol_type = other RNA
gtgtgcctgatgtcacctca

SEQ ID NO: 1496 - RNA, 20 nt, synthetic construct
  source 1..20: mol_type = other RNA
tgtgcctgatgtcacctcat

SEQ ID NO: 1497 - RNA, 20 nt, synthetic construct
  source 1..20: mol_type = other RNA
gtgcctgatgtcacctcatg

SEQ ID NO: 1498 - RNA, 20 nt, synthetic construct
  source 1..20: mol_type = other RNA
gcctgatgtcacctcatgat

SEQ ID NO: 1499 - RNA, 20 nt, synthetic construct
  source 1..20: mol_type = other RNA
ttttttaactcctgcgccaa

SEQ ID NO: 1500 - RNA, 20 nt, synthetic construct
  source 1..20: mol_type = other RNA
ttaactcctgcgccaaggac

SEQ ID NO: 1501 - RNA, 20 nt, synthetic construct
  source 1..20: mol_type = other RNA
aactcctgcgccaaggacag

SEQ ID NO: 1502 - RNA, 20 nt, synthetic construct
  source 1..20: mol_type = other RNA
actcctgcgccaaggacagt

SEQ ID NO: 1503 - RNA, 20 nt, synthetic construct
  source 1..20: mol_type = other RNA
tgtccacctttgtgctttgc

SEQ ID NO: 1504 - RNA, 20 nt, synthetic construct
  source 1..20: mol_type = other RNA
tccacctttgtgctttgcga

SEQ ID NO: 1505 - RNA, 20 nt, synthetic construct
  source 1..20: mol_type = other RNA
cacctttgtgctttgcgagg

SEQ ID NO: 1506 - RNA, 20 nt, synthetic construct
  source 1..20: mol_type = other RNA
cctttgtgctttgcgaggcc

SEQ ID NO: 1507 - RNA, 20 nt, synthetic construct
  source 1..20: mol_type = other RNA
cctttgtgctttgcgaggcc

SEQ ID NO: 1508 - RNA, 20 nt, synthetic construct
  source 1..20: mol_type = other RNA
gagcccaggcatctgctcgc

SEQ ID NO: 1509 - RNA, 20 nt, synthetic construct
  source 1..20: mol_type = other RNA
cccaggcatctgctcgcctg

SEQ ID NO: 1510 - RNA, 20 nt, synthetic construct
  source 1..20: mol_type = other RNA
caggcatctgctcgcctgcc

SEQ ID NO: 1511 - RNA, 20 nt, synthetic construct
  source 1..20: mol_type = other RNA
gcatctgctcgcctgccacg

SEQ ID NO: 1512 - RNA, 20 nt, synthetic construct
  source 1..20: mol_type = other RNA
tgccacggctgaccagagaa

SEQ ID NO: 1513 - RNA, 20 nt, synthetic construct
  source 1..20: mol_type = other RNA
gagctctgccttagacgacg

SEQ ID NO: 1514 - RNA, 20 nt, synthetic construct
  source 1..20: mol_type = other RNA
agctctgccttagacgacgt

SEQ ID NO: 1515 - RNA, 20 nt, synthetic construct
  source 1..20: mol_type = other RNA
gctctgccttagacgacgtg

SEQ ID NO: 1516 - RNA, 20 nt, synthetic construct
  source 1..20: mol_type = other RNA
ctctgccttagacgacgtgt

SEQ ID NO: 1517 - RNA, 20 nt, synthetic construct
  source 1..20: mol_type = other RNA
tctgccttagacgacgtgtt

SEQ ID NO: 1518 - RNA, 20 nt, synthetic construct
  source 1..20: mol_type = other RNA
ctgccttagacgacgtgtta

SEQ ID NO: 1519 - RNA, 20 nt, synthetic construct
  source 1..20: mol_type = other RNA
gccttagacgacgtgttaca

SEQ ID NO: 1520 - RNA, 20 nt, synthetic construct
  source 1..20: mol_type = other RNA
ccttagacgacgtgttacag

SEQ ID NO: 1521 - RNA, 20 nt, synthetic construct
  source 1..20: mol_type = other RNA
cttagacgacgtgttacagt

SEQ ID NO: 1522 - RNA, 20 nt, synthetic construct
  source 1..20: mol_type = other RNA
tagacgacgtgttacagtat

SEQ ID NO: 1523 - RNA, 20 nt, synthetic construct
  source 1..20: mol_type = other RNA
acgacgtgttacagtatgaa

SEQ ID NO: 1524 - RNA, 20 nt, synthetic construct
  source 1..20: mol_type = other RNA
acacagcagaggcaccctcg

SEQ ID NO: 1525 - RNA, 20 nt, synthetic construct
  source 1..20: mol_type = other RNA
cacagcagaggcaccctcgt

SEQ ID NO: 1526 - RNA, 20 nt, synthetic construct
  source 1..20: mol_type = other RNA
acagcagaggcaccctcgta

SEQ ID NO: 1527 - RNA, 20 nt, synthetic construct
  source 1..20: mol_type = other RNA
cagcagaggcaccctcgtat

SEQ ID NO: 1528 - RNA, 20 nt, synthetic construct
  source 1..20: mol_type = other RNA
agcagaggcaccctcgtatg

SEQ ID NO: 1529 - RNA, 20 nt, synthetic construct
  source 1..20: mol_type = other RNA
gcagaggcaccctcgtatgt

SEQ ID NO: 1530 - RNA, 20 nt, synthetic construct
  source 1..20: mol_type = other RNA
cagaggcaccctcgtatgtt

SEQ ID NO: 1531 - RNA, 20 nt, synthetic construct
  source 1..20: mol_type = other RNA
agaggcaccctcgtatgttt

SEQ ID NO: 1532 - RNA, 20 nt, synthetic construct
  source 1..20: mol_type = other RNA
gaggcaccctcgtatgtttt

SEQ ID NO: 1533 - RNA, 20 nt, synthetic construct
  source 1..20: mol_type = other RNA
ggcaccctcgtatgttttga

SEQ ID NO: 1534 - RNA, 20 nt, synthetic construct
  source 1..20: mol_type = other RNA
ccctcgtatgttttgaaagt

SEQ ID NO: 1535 - RNA, 20 nt, synthetic construct
  source 1..20: mol_type = other RNA
atgtaaaactatactgaccc

SEQ ID NO: 1536 - RNA, 20 nt, synthetic construct
  source 1..20: mol_type = other RNA
tgtaaaactatactgacccg

SEQ ID NO: 1537 - RNA, 20 nt, synthetic construct
  source 1..20: mol_type = other RNA
gtaaaactatactgacccgt

SEQ ID NO: 1538 - RNA, 20 nt, synthetic construct
  source 1..20: mol_type = other RNA
taaaactatactgacccgtt

SEQ ID NO: 1539 - RNA, 20 nt, synthetic construct
  source 1..20: mol_type = other RNA
actatactgacccgttttca

SEQ ID NO: 1540 - RNA, 20 nt, synthetic construct
  source 1..20: mol_type = other RNA
atactgacccgttttcagtt

SEQ ID NO: 1541 - RNA, 20 nt, synthetic construct
  source 1..20: mol_type = other RNA
tttcagttttaaagggtcgt

SEQ ID NO: 1542 - RNA, 20 nt, synthetic construct
  source 1..20: mol_type = other RNA
ttcagttttaaagggtcgtg

SEQ ID NO: 1543 - RNA, 20 nt, synthetic construct
  source 1..20: mol_type = other RNA
tcagttttaaagggtcgtga

SEQ ID NO: 1544 - RNA, 20 nt, synthetic construct
  source 1..20: mol_type = other RNA
cagttttaaagggtcgtgag

SEQ ID NO: 1545 - RNA, 20 nt, synthetic construct
  source 1..20: mol_type = other RNA
gttttaaagggtcgtgagaa

SEQ ID NO: 1546 - RNA, 20 nt, synthetic construct
  source 1..20: mol_type = other RNA
tttaaagggtcgtgagaaac

SEQ ID NO: 1547 - RNA, 20 nt, synthetic construct
  source 1..20: mol_type = other RNA
taaagggtcgtgagaaactg

SEQ ID NO: 1548 - RNA, 20 nt, synthetic construct
  source 1..20: mol_type = other RNA
aaagggtcgtgagaaactgg

SEQ ID NO: 1549 - RNA, 20 nt, synthetic construct
  source 1..20: mol_type = other RNA
gagaaactggctggtccaat

SEQ ID NO: 1550 - RNA, 20 nt, synthetic construct
  source 1..20: mol_type = other RNA
tggtccaatgggatttacag

SEQ ID NO: 1551 - RNA, 20 nt, synthetic construct
  source 1..20: mol_type = other RNA
ccaatgggatttacagcaac

SEQ ID NO: 1552 - RNA, 20 nt, synthetic construct
  source 1..20: mol_type = other RNA
tttaagtttgctcttaatcg

SEQ ID NO: 1553 - RNA, 20 nt, synthetic construct
  source 1..20: mol_type = other RNA
ttaagtttgctcttaatcgt

SEQ ID NO: 1554 - RNA, 20 nt, synthetic construct
  source 1..20: mol_type = other RNA
agtttgctcttaatcgtatg

SEQ ID NO: 1555 - RNA, 20 nt, synthetic construct
  source 1..20: mol_type = other RNA
gtttgctcttaatcgtatgg

SEQ ID NO: 1556 - RNA, 20 nt, synthetic construct
  source 1..20: mol_type = other RNA
tttgctcttaatcgtatgga

SEQ ID NO: 1557 - RNA, 20 nt, synthetic construct
  source 1..20: mol_type = other RNA
tgctcttaatcgtatggaag

SEQ ID NO: 1558 - RNA, 20 nt, synthetic construct
  source 1..20: mol_type = other RNA
cttaatcgtatggaagcttg

SEQ ID NO: 1559 - RNA, 20 nt, synthetic construct
  source 1..20: mol_type = other RNA
ttaatcgtatggaagcttga

SEQ ID NO: 1560 - RNA, 20 nt, synthetic construct
  source 1..20: mol_type = other RNA
ggaagcttgagctatgtgtt

SEQ ID NO: 1561 - RNA, 20 nt, synthetic construct
  source 1..20: mol_type = other RNA
gaagcttgagctatgtgttg

SEQ ID NO: 1562 - RNA, 20 nt, synthetic construct
  source 1..20: mol_type = other RNA
agcttgagctatgtgttgga

SEQ ID NO: 1563 - RNA, 20 nt, synthetic construct
  source 1..20: mol_type = other RNA
gcttgagctatgtgttggaa

SEQ ID NO: 1564 - RNA, 20 nt, synthetic construct
  source 1..20: mol_type = other RNA
cttgagctatgtgttggaag

SEQ ID NO: 1565 - RNA, 20 nt, synthetic construct
  source 1..20: mol_type = other RNA
ttgagctatgtgttggaagt

SEQ ID NO: 1566 - RNA, 20 nt, synthetic construct
  source 1..20: mol_type = other RNA
tgagctatgtgttggaagtg

SEQ ID NO: 1567 - RNA, 20 nt, synthetic construct
  source 1..20: mol_type = other RNA
gagctatgtgttggaagtgc

SEQ ID NO: 1568 - RNA, 20 nt, synthetic construct
  source 1..20: mol_type = other RNA
gtgttggaagtgccctggtt

SEQ ID NO: 1569 - RNA, 20 nt, synthetic construct
  source 1..20: mol_type = other RNA
ggaagtgccctggttttaat

SEQ ID NO: 1570 - RNA, 20 nt, synthetic construct
  source 1..20: mol_type = other RNA
ctggttttaatccatacaca

SEQ ID NO: 1571 - RNA, 20 nt, synthetic construct
  source 1..20: mol_type = other RNA
ttaatccatacacaaagacg

SEQ ID NO: 1572 - RNA, 20 nt, synthetic construct
  source 1..20: mol_type = other RNA
taatccatacacaaagacgg

SEQ ID NO: 1573 - RNA, 20 nt, synthetic construct
  source 1..20: mol_type = other RNA
aatccatacacaaagacggt

SEQ ID NO: 1574 - RNA, 20 nt, synthetic construct
  source 1..20: mol_type = other RNA
atccatacacaaagacggta

SEQ ID NO: 1575 - RNA, 20 nt, synthetic construct
  source 1..20: mol_type = other RNA
tccatacacaaagacggtac

SEQ ID NO: 1576 - RNA, 20 nt, synthetic construct
  source 1..20: mol_type = other RNA
catacacaaagacggtacat

SEQ ID NO: 1577 - RNA, 20 nt, synthetic construct
  source 1..20: mol_type = other RNA
tacacaaagacggtacataa

SEQ ID NO: 1578 - RNA, 20 nt, synthetic construct
  source 1..20: mol_type = other RNA
acacaaagacggtacataat

SEQ ID NO: 1579 - RNA, 20 nt, synthetic construct
  source 1..20: mol_type = other RNA
cacaaagacggtacataatc

SEQ ID NO: 1580 - RNA, 20 nt, synthetic construct
  source 1..20: mol_type = other RNA
acaaagacggtacataatcc

SEQ ID NO: 1581 - RNA, 20 nt, synthetic construct
  source 1..20: mol_type = other RNA
caaagacggtacataatcct

SEQ ID NO: 1582 - RNA, 20 nt, synthetic construct
  source 1..20: mol_type = other RNA
aaagacggtacataatccta

SEQ ID NO: 1583 - RNA, 20 nt, synthetic construct
  source 1..20: mol_type = other RNA
aagacggtacataatcctac

SEQ ID NO: 1584 - RNA, 20 nt, synthetic construct
  source 1..20: mol_type = other RNA
gtacataatcctacaggttt

SEQ ID NO: 1585 - RNA, 20 nt, synthetic construct
  source 1..20: mol_type = other RNA
cataatcctacaggtttaaa

SEQ ID NO: 1586 - RNA, 20 nt, synthetic construct
  source 1..20: mol_type = other RNA
atcctacaggtttaaatgta

SEQ ID NO: 1587 - RNA, 20 nt, synthetic construct
  source 1..20: mol_type = other RNA
tagtttggaattctttgctc

SEQ ID NO: 1588 - RNA, 20 nt, synthetic construct
  source 1..20: mol_type = other RNA
agtttggaattctttgctct

SEQ ID NO: 1589 - RNA, 20 nt, synthetic construct
  source 1..20: mol_type = other RNA
tttggaattctttgctctac

SEQ ID NO: 1590 - RNA, 20 nt, synthetic construct
  source 1..20: mol_type = other RNA
ttgctctactgtttacattg

SEQ ID NO: 1591 - RNA, 20 nt, synthetic construct
  source 1..20: mol_type = other RNA
tctactgtttacattgcaga

SEQ ID NO: 1592 - RNA, 20 nt, synthetic construct
  source 1..20: mol_type = other RNA
tactgtttacattgcagatt

SEQ ID NO: 1593 - RNA, 20 nt, synthetic construct
  source 1..20: mol_type = other RNA
actgtttacattgcagattg

SEQ ID NO: 1594 - RNA, 20 nt, synthetic construct
  source 1..20: mol_type = other RNA
tttacattgcagattgctat

SEQ ID NO: 1595 - RNA, 20 nt, synthetic construct
  source 1..20: mol_type = other RNA
ttacattgcagattgctata

SEQ ID NO: 1596 - RNA, 20 nt, synthetic construct
  source 1..20: mol_type = other RNA
tacattgcagattgctataa

SEQ ID NO: 1597 - RNA, 20 nt, synthetic construct
  source 1..20: mol_type = other RNA
attgctataatttcaaggag

SEQ ID NO: 1598 - RNA, 20 nt, synthetic construct
  source 1..20: mol_type = other RNA
ttgctataatttcaaggagt

SEQ ID NO: 1599 - RNA, 20 nt, synthetic construct
  source 1..20: mol_type = other RNA
aatgatgcactttaggatgt

SEQ ID NO: 1600 - RNA, 20 nt, synthetic construct
  source 1..20: mol_type = other RNA
atgatgcactttaggatgtt

SEQ ID NO: 1601 - RNA, 20 nt, synthetic construct
  source 1..20: mol_type = other RNA
acatgaatcattcacatgac

SEQ ID NO: 1602 - RNA, 20 nt, synthetic construct
  source 1..20: mol_type = other RNA
catgaatcattcacatgacc

SEQ ID NO: 1603 - RNA, 20 nt, synthetic construct
  source 1..20: mol_type = other RNA
aaatacatgtctagtctgtc

SEQ ID NO: 1604 - RNA, 20 nt, synthetic construct
  source 1..20: mol_type = other RNA
atgtctagtctgtcctttaa

SEQ ID NO: 1605 - RNA, 20 nt, synthetic construct
  source 1..20: mol_type = other RNA
tgtctagtctgtcctttaat

SEQ ID NO: 1606 - RNA, 20 nt, synthetic construct
  source 1..20: mol_type = other RNA
tctagtctgtcctttaatag

SEQ ID NO: 1607 - RNA, 20 nt, synthetic construct
  source 1..20: mol_type = other RNA
ctagtctgtcctttaatagc

SEQ ID NO: 1608 - RNA, 20 nt, synthetic construct
  source 1..20: mol_type = other RNA
tagtctgtcctttaatagct

SEQ ID NO: 1609 - RNA, 20 nt, synthetic construct
  source 1..20: mol_type = other RNA
gtctgtcctttaatagctct

SEQ ID NO: 1610 - RNA, 20 nt, synthetic construct
  source 1..20: mol_type = other RNA
aatcagatcattaccagtta

SEQ ID NO: 1611 - RNA, 20 nt, synthetic construct
  source 1..20: mol_type = other RNA
tcagatcattaccagttagc

SEQ ID NO: 1612 - RNA, 20 nt, synthetic construct
  source 1..20: mol_type = other RNA
cagatcattaccagttagct

SEQ ID NO: 1613 - RNA, 20 nt, synthetic construct
  source 1..20: mol_type = other RNA
agatcattaccagttagctt

SEQ ID NO: 1614 - RNA, 20 nt, synthetic construct
  source 1..20: mol_type = other RNA
tcattaccagttagctttta

SEQ ID NO: 1615 - RNA, 20 nt, synthetic construct
  source 1..20: mol_type = other RNA
cattaccagttagcttttaa

SEQ ID NO: 1616 - RNA, 20 nt, synthetic construct
  source 1..20: mol_type = other RNA
accagttagcttttaaagca

SEQ ID NO: 1617 - RNA, 20 nt, synthetic construct
  source 1..20: mol_type = other RNA
aagcacatttgtttaagact

SEQ ID NO: 1618 - RNA, 20 nt, synthetic construct
  source 1..20: mol_type = other RNA
gcacatttgtttaagactat

SEQ ID NO: 1619 - RNA, 20 nt, synthetic construct
  source 1..20: mol_type = other RNA
ctatgtttttggaaaaatac

SEQ ID NO: 1620 - RNA, 20 nt, synthetic construct
  source 1..20: mol_type = other RNA
gtttttggaaaaatacgcta

SEQ ID NO: 1621 - RNA, 20 nt, synthetic construct
  source 1..20: mol_type = other RNA
ttggaaaaatacgctacaga

SEQ ID NO: 1622 - RNA, 20 nt, synthetic construct
  source 1..20: mol_type = other RNA
aataaatgagatgctactaa

SEQ ID NO: 1623 - RNA, 20 nt, synthetic construct
  source 1..20: mol_type = other RNA
tgagatgctactaattgttt

SEQ ID NO: 1624 - RNA, 20 nt, synthetic construct
  source 1..20: mol_type = other RNA
tttggaatctgttgtttctg

SEQ ID NO: 1625 - RNA, 20 nt, synthetic construct
  source 1..20: mol_type = other RNA
ttctgccaaaggtaaattaa

SEQ ID NO: 1626 - RNA, 20 nt, synthetic construct
  source 1..20: mol_type = other RNA
tctgccaaaggtaaattaac

SEQ ID NO: 1627 - RNA, 20 nt, synthetic construct
  source 1..20: mol_type = other RNA
gatttattcaggaatcccca

SEQ ID NO: 1628 - RNA, 20 nt, synthetic construct
  source 1..20: mol_type = other RNA
attcaggaatccccatttga

SEQ ID NO: 1629 - RNA, 20 nt, synthetic construct
  source 1..20: mol_type = other RNA
ggaatccccatttgaatttg

SEQ ID NO: 1630 - RNA, 20 nt, synthetic construct
  source 1..20: mol_type = other RNA
ctcccattctttcatgaggc

SEQ ID NO: 1631 - RNA, 20 nt, synthetic construct
  source 1..20: mol_type = other RNA
aaggaagaccgcactcctat

SEQ ID NO: 1632 - RNA, 20 nt, synthetic construct
  source 1..20: mol_type = other RNA
gaaaaccgatttcagtgcac

SEQ ID NO: 1633 - RNA, 20 nt, synthetic construct
  source 1..20: mol_type = other RNA
gggagagacaagggacttat

SEQ ID NO: 1634 - RNA, 20 nt, synthetic construct
  source 1..20: mol_type = other RNA
gatgttaataactctggagg

SEQ ID NO: 1635 - RNA, 20 nt, synthetic construct
  source 1..20: mol_type = other RNA
caccaaactcccattctttc

SEQ ID NO: 1636 - RNA, 20 nt, synthetic construct
  source 1..20: mol_type = other RNA
gcaaccggagaactcttaga

SEQ ID NO: 1637 - RNA, 20 nt, synthetic construct
  source 1..20: mol_type = other RNA
cacaaagacggtacataatc

SEQ ID NO: 1638 - RNA, 20 nt, synthetic construct
  source 1..20: mol_type = other RNA
cggaagtttgaagatagatt

SEQ ID NO: 1639 - RNA, 20 nt, synthetic construct
  source 1..20: mol_type = other RNA
acagagagatggtaagcagc

SEQ ID NO: 1640 - RNA, 20 nt, synthetic construct
  source 1..20: mol_type = other RNA
cctcggttctacgcttatgg

SEQ ID NO: 1641 - RNA, 20 nt, synthetic construct
  source 1..20: mol_type = other RNA
ctcctcggttctacgcttat

SEQ ID NO: 1642 - RNA, 20 nt, synthetic construct
  source 1..20: mol_type = other RNA
tgcaaacgtgcattggagcc

SEQ ID NO: 1643 - RNA, 20 nt, synthetic construct
  source 1..20: mol_type = other RNA
gaagaccgcactcctatggc

SEQ ID NO: 1644 - RNA, 20 nt, synthetic construct
  source 1..20: mol_type = other RNA
gacaagggacttatcaacaa

SEQ ID NO: 1645 - RNA, 20 nt, synthetic construct
  source 1..20: mol_type = other RNA
tcagaaatccagtactaaac

SEQ ID NO: 1646 - RNA, 20 nt, synthetic construct
  source 1..20: mol_type = other RNA
aaataccatcaaaatgcagc

SEQ ID NO: 1647 - RNA, 20 nt, synthetic construct
  source 1..20: mol_type = other RNA
aatgaccttgccaaattccg

SEQ ID NO: 1648 - RNA, 20 nt, synthetic construct
  source 1..20: mol_type = other RNA
cccaatggatgataaaatac

SEQ ID NO: 1649 - RNA, 20 nt, synthetic construct
  source 1..20: mol_type = other RNA
agacgatagcaatgtgaagc

SEQ ID NO: 1650 - RNA, 20 nt, synthetic construct
  source 1..20: mol_type = other RNA
gaagacgatagcaatgtgaa

SEQ ID NO: 1651 - RNA, 20 nt, synthetic construct
  source 1..20: mol_type = other RNA
tcagaagacgatagcaatgt

SEQ ID NO: 1652 - RNA, 20 nt, synthetic construct
  source 1..20: mol_type = other RNA
gggtcagaagacgatagcaa

SEQ ID NO: 1653 - RNA, 20 nt, synthetic construct
  source 1..20: mol_type = other RNA
aaagacggtacataatccta

SEQ ID NO: 1654 - RNA, 20 nt, synthetic construct
  source 1..20: mol_type = other RNA
tgtctccgaagtgccccagt

SEQ ID NO: 1655 - RNA, 20 nt, synthetic construct
  source 1..20: mol_type = other RNA
tagtttggaattctttgctc

SEQ ID NO: 1656 - RNA, 20 nt, synthetic construct
  source 1..20: mol_type = other RNA
ccaaactcccattctttcat

SEQ ID NO: 1657 - RNA, 20 nt, synthetic construct
  source 1..20: mol_type = other RNA
gtacataatcctacaggttt

SEQ ID NO: 1658 - RNA, 20 nt, synthetic construct
  source 1..20: mol_type = other RNA
catgctctctcctcggttct

SEQ ID NO: 1659 - RNA, 20 nt, synthetic construct
  source 1..20: mol_type = other RNA
accccatgctctctcctcgg

SEQ ID NO: 1660 - RNA, 20 nt, synthetic construct
  source 1..20: mol_type = other RNA
ccgatcagctgtagaacaac

SEQ ID NO: 1661 - RNA, 20 nt, synthetic construct
  source 1..20: mol_type = other RNA
aaccggagaactcttagaaa

SEQ ID NO: 1662 - RNA, 20 nt, synthetic construct
  source 1..20: mol_type = other RNA
acacagtagtggagctttcc

SEQ ID NO: 1663 - RNA, 20 nt, synthetic construct
  source 1..20: mol_type = other RNA
aaatacatgtctagtctgtc

SEQ ID NO: 1664 - RNA, 20 nt, synthetic construct
  source 1..20: mol_type = other RNA
atccggaagtttgaagatag

SEQ ID NO: 1665 - RNA, 20 nt, synthetic construct
  source 1..20: mol_type = other RNA
gcaagcctaaacgtcagaaa

SEQ ID NO: 1666 - RNA, 20 nt, synthetic construct
  source 1..20: mol_type = other RNA
ttgaatactcaggaagtcga

SEQ ID NO: 1667 - RNA, 20 nt, synthetic construct
  source 1..20: mol_type = other RNA
gttcaaccaccttgatgatt

SEQ ID NO: 1668 - RNA, 20 nt, synthetic construct
  source 1..20: mol_type = other RNA
tactgtttacattgcagatt

SEQ ID NO: 1669 - RNA, 20 nt, synthetic construct
  source 1..20: mol_type = other RNA
accttgccaaattccggaga

SEQ ID NO: 1670 - RNA, 20 nt, synthetic construct
  source 1..20: mol_type = other RNA
caatggatgataaaatacca

SEQ ID NO: 1671 - RNA, 20 nt, synthetic construct
  source 1..20: mol_type = other RNA
ggctcctgtttccattgcct

SEQ ID NO: 1672 - RNA, 20 nt, synthetic construct
  source 1..20: mol_type = other RNA
gaccagattgctaatgagaa

SEQ ID NO: 1673 - RNA, 20 nt, synthetic construct
  source 1..20: mol_type = other RNA
aggcattttgtaattggaaa

SEQ ID NO: 1674 - RNA, 20 nt, synthetic construct
  source 1..20: mol_type = other RNA
taggcattttgtaattggaa

SEQ ID NO: 1675 - RNA, 20 nt, synthetic construct
  source 1..20: mol_type = other RNA
gattccaagtccatgtgagg

SEQ ID NO: 1676 - RNA, 20 nt, synthetic construct
  source 1..20: mol_type = other RNA
ccgcactcctatggctgaag

SEQ ID NO: 1677 - RNA, 20 nt, synthetic construct
  source 1..20: mol_type = other RNA
cttcgggattttgaagacaa

SEQ ID NO: 1678 - RNA, 20 nt, synthetic construct
  source 1..20: mol_type = other RNA
tttgagagccccacaatgaa

SEQ ID NO: 1679 - RNA, 20 nt, synthetic construct
  source 1..20: mol_type = other RNA
aaccgatttcagtgcacgat

SEQ ID NO: 1680 - RNA, 20 nt, synthetic construct
  source 1..20: mol_type = other RNA
acaagggacttatcaacaaa

SEQ ID NO: 1681 - RNA, 20 nt, synthetic construct
  source 1..20: mol_type = other RNA
gtaaaactatactgacccgt

SEQ ID NO: 1682 - RNA, 20 nt, synthetic construct
  source 1..20: mol_type = other RNA
tctactgtttacattgcaga

SEQ ID NO: 1683 - RNA, 20 nt, synthetic construct
  source 1..20: mol_type = other RNA
gttttggttcccaacttgag

SEQ ID NO: 1684 - RNA, 20 nt, synthetic construct
  source 1..20: mol_type = other RNA
ttgagctatgtgttggaagt

SEQ ID NO: 1685 - RNA, 20 nt, synthetic construct
  source 1..20: mol_type = other RNA
ttaagtttgctcttaatcgt

SEQ ID NO: 1686 - RNA, 20 nt, synthetic construct
  source 1..20: mol_type = other RNA
tgaccttgccaaattccgga

SEQ ID NO: 1687 - RNA, 20 nt, synthetic construct
  source 1..20: mol_type = other RNA
tttaagtttgctcttaatcg

SEQ ID NO: 1688 - RNA, 20 nt, synthetic construct
  source 1..20: mol_type = other RNA
accatccgatcagctgtaga

SEQ ID NO: 1689 - RNA, 20 nt, synthetic construct
  source 1..20: mol_type = other RNA
acaaatgaccttgccaaatt

SEQ ID NO: 1690 - RNA, 20 nt, synthetic construct
  source 1..20: mol_type = other RNA
aaagaaccatccgatcagct

SEQ ID NO: 1691 - RNA, 20 nt, synthetic construct
  source 1..20: mol_type = other RNA
ctgattttatcgtcaaacac

SEQ ID NO: 1692 - RNA, 20 nt, synthetic construct
  source 1..20: mol_type = other RNA
tctctcctcggttctacgct

SEQ ID NO: 1693 - RNA, 20 nt, synthetic construct
  source 1..20: mol_type = other RNA
agtttgaagatagattcgaa

SEQ ID NO: 1694 - RNA, 20 nt, synthetic construct
  source 1..20: mol_type = other RNA
tttacattgcagattgctat

SEQ ID NO: 1695 - RNA, 20 nt, synthetic construct
  source 1..20: mol_type = other RNA
atggtcactctgaaaaccga

SEQ ID NO: 1696 - RNA, 20 nt, synthetic construct
  source 1..20: mol_type = other RNA
tctcaattccacacgatctc

SEQ ID NO: 1697 - RNA, 20 nt, synthetic construct
  source 1..20: mol_type = other RNA
tccacacgatctcatgagag

SEQ ID NO: 1698 - RNA, 20 nt, synthetic construct
  source 1..20: mol_type = other RNA
gacaatcaggacggtcttgt

SEQ ID NO: 1699 - RNA, 20 nt, synthetic construct
  source 1..20: mol_type = other RNA
aagagcctatccctgctttc

SEQ ID NO: 1700 - RNA, 20 nt, synthetic construct
  source 1..20: mol_type = other RNA
tcaggacggtcttgtgaata

SEQ ID NO: 1701 - RNA, 20 nt, synthetic construct
  source 1..20: mol_type = other RNA
gtcagaaatccagtactaaa

SEQ ID NO: 1702 - RNA, 20 nt, synthetic construct
  source 1..20: mol_type = other RNA
agtttggaattctttgctct

SEQ ID NO: 1703 - RNA, 20 nt, synthetic construct
  source 1..20: mol_type = other RNA
tttggaattctttgctctac

SEQ ID NO: 1704 - RNA, 20 nt, synthetic construct
  source 1..20: mol_type = other RNA
ctgaaatggacaaatgacct

SEQ ID NO: 1705 - RNA, 20 nt, synthetic construct
  source 1..20: mol_type = other RNA
aagacggtacataatcctac

SEQ ID NO: 1706 - RNA, 20 nt, synthetic construct
  source 1..20: mol_type = other RNA
ggtcttgtgaatatggaaag

SEQ ID NO: 1707 - RNA, 20 nt, synthetic construct
  source 1..20: mol_type = other RNA
ttcaaccaccttgatgattg

SEQ ID NO: 1708 - RNA, 20 nt, synthetic construct
  source 1..20: mol_type = other RNA
actttattctatagagcaaa

SEQ ID NO: 1709 - RNA, 20 nt, synthetic construct
  source 1..20: mol_type = other RNA
agaccgcactcctatggctg

SEQ ID NO: 1710 - RNA, 20 nt, synthetic construct
  source 1..20: mol_type = other RNA
tatttccccaatggatgata

SEQ ID NO: 1711 - RNA, 20 nt, synthetic construct
  source 1..20: mol_type = other RNA
gtcagaagacgatagcaatg

SEQ ID NO: 1712 - RNA, 20 nt, synthetic construct
  source 1..20: mol_type = other RNA
gctaatgagaaagtggctct

SEQ ID NO: 1713 - RNA, 20 nt, synthetic construct
  source 1..20: mol_type = other RNA
cattaccagttagcttttaa

SEQ ID NO: 1714 - RNA, 20 nt, synthetic construct
  source 1..20: mol_type = other RNA
ttgctataatttcaaggagt

SEQ ID NO: 1715 - RNA, 20 nt, synthetic construct
  source 1..20: mol_type = other RNA
tctactgtttacattgcaga

SEQ ID NO: 1716 - RNA, 20 nt, synthetic construct
  source 1..20: mol_type = other RNA
aataaatgagatgctactaa

SEQ ID NO: 1717 - RNA, 20 nt, synthetic construct
  source 1..20: mol_type = other RNA
ttattctatagagcaaactt

SEQ ID NO: 1718 - RNA, 20 nt, synthetic construct
  source 1..20: mol_type = other RNA
atgatgcactttaggatgtt

SEQ ID NO: 1719 - RNA, 20 nt, synthetic construct
  source 1..20: mol_type = other RNA
tacattgcagattgctataa

SEQ ID NO: 1720 - RNA, 20 nt, synthetic construct
  source 1..20: mol_type = other RNA
ttacattgcagattgctata

SEQ ID NO: 1721 - RNA, 20 nt, synthetic construct
  source 1..20: mol_type = other RNA
gttttaaagggtcgtgagaa

SEQ ID NO: 1722 - RNA, 20 nt, synthetic construct
  source 1..20: mol_type = other RNA
tgagctatgtgttggaagtg

SEQ ID NO: 1723 - RNA, 20 nt, synthetic construct
  source 1..20: mol_type = other RNA
tttggcatcggctcctgttt

SEQ ID NO: 1724 - RNA, 20 nt, synthetic construct
  source 1..20: mol_type = other RNA
atcctacaggtttaaatgta

SEQ ID NO: 1725 - RNA, 20 nt, synthetic construct
  source 1..20: mol_type = other RNA
tacacaaagacggtacataa

SEQ ID NO: 1726 - RNA, 20 nt, synthetic construct
  source 1..20: mol_type = other RNA
gcaaccggagaactcttaga

SEQ ID NO: 1727 - RNA, 20 nt, synthetic construct
  source 1..20: mol_type = other RNA
caccaaactcccattctttc

SEQ ID NO: 1728 - RNA, 20 nt, synthetic construct
  source 1..20: mol_type = other RNA
cttcgggattttgaagacaa

SEQ ID NO: 1729 - RNA, 20 nt, synthetic construct
  source 1..20: mol_type = other RNA
atccggaagtttgaagatag

SEQ ID NO: 1730 - RNA, 20 nt, synthetic construct
  source 1..20: mol_type = other RNA
aaccggagaactcttagaat

SEQ ID NO: 1731 - RNA, 20 nt, synthetic construct
  source 1..20: mol_type = other RNA
aaccggagaactcttagaat

SEQ ID NO: 1732 - RNA, 20 nt, synthetic construct
  source 1..20: mol_type = other RNA
ccaaactcccattctttcat

SEQ ID NO: 1733 - RNA, 20 nt, synthetic construct
  source 1..20: mol_type = other RNA
cccaatggatgataaaatac

SEQ ID NO: 1734 - RNA, 20 nt, synthetic construct
  source 1..20: mol_type = other RNA
cctcggttctacgcttatgg

SEQ ID NO: 1735 - RNA, 20 nt, synthetic construct
  source 1..20: mol_type = other RNA
ccggaagtttgaagatagat

SEQ ID NO: 1736 - RNA, 20 nt, synthetic construct
  source 1..20: mol_type = other RNA
ccggaagtttgaagatagat

SEQ ID NO: 1737 - RNA, 20 nt, synthetic construct
  source 1..20: mol_type = other RNA
aaccggagaactcttagaat

SEQ ID NO: 1738 - RNA, 20 nt, synthetic construct
  source 1..20: mol_type = other RNA
tcggttctacgcttatggtt

SEQ ID NO: 1739 - RNA, 20 nt, synthetic construct
  source 1..20: mol_type = other RNA
ccaaactcccattctttcat

SEQ ID NO: 1740 - RNA, 20 nt, synthetic construct
  source 1..20: mol_type = other RNA
tcgggattttgaagacaatt

SEQ ID NO: 1741 - RNA, 20 nt, synthetic construct
  source 1..20: mol_type = other RNA
caatggatgataaaatactt

SEQ ID NO: 1742 - RNA, 20 nt, synthetic construct
  source 1..20: mol_type = other RNA
tcggttctacgcttatggtt

SEQ ID NO: 1743 - RNA, 20 nt, synthetic construct
  source 1..20: mol_type = other RNA
aaccggagaactcttagaat

SEQ ID NO: 1744 - RNA, 20 nt, synthetic construct
  source 1..20: mol_type = other RNA
ccaaactcccattctttcat

SEQ ID NO: 1745 - RNA, 20 nt, synthetic construct
  source 1..20: mol_type = other RNA
tcgggattttgaagacaatt

SEQ ID NO: 1746 - RNA, 20 nt, synthetic construct
  source 1..20: mol_type = other RNA
caatggatgataaaatactt

SEQ ID NO: 1747 - RNA, 20 nt, synthetic construct
  source 1..20: mol_type = other RNA
cctcggttctacgcttatgg

SEQ ID NO: 1748 - RNA, 20 nt, synthetic construct
  source 1..20: mol_type = other RNA
gcaaccggagaactcttaga

SEQ ID NO: 1749 - RNA, 20 nt, synthetic construct
  source 1..20: mol_type = other RNA
caccaaactcccattctttc

SEQ ID NO: 1750 - RNA, 20 nt, synthetic construct
  source 1..20: mol_type = other RNA
cttcgggattttgaagacaa

SEQ ID NO: 1751 - RNA, 20 nt, synthetic construct
  source 1..20: mol_type = other RNA
cccaatggatgataaaatac

SEQ ID NO: 1752 - RNA, 20 nt, synthetic construct
  source 1..20: mol_type = other RNA
cctcggttctacgcttatgg

SEQ ID NO: 1753 - RNA, 20 nt, synthetic construct
  source 1..20: mol_type = other RNA
gcaaccggagaactcttaga

SEQ ID NO: 1754 - RNA, 20 nt, synthetic construct
  source 1..20: mol_type = other RNA
caccaaactcccattctttc

SEQ ID NO: 1755 - RNA, 20 nt, synthetic construct
  source 1..20: mol_type = other RNA
cttcgggattttgaagacaa

SEQ ID NO: 1756 - RNA, 20 nt, synthetic construct
  source 1..20: mol_type = other RNA
cccaatggatgataaaatac

SEQ ID NO: 1757 - RNA, 20 nt, synthetic construct
  source 1..20: mol_type = other RNA
cctcggttctacgcttatgg

SEQ ID NO: 1758 - RNA, 20 nt, synthetic construct
  source 1..20: mol_type = other RNA
gcaaccggagaactcttaga

SEQ ID NO: 1759 - RNA, 20 nt, synthetic construct
  source 1..20: mol_type = other RNA
caccaaactcccattctttc

SEQ ID NO: 1760 - RNA, 20 nt, synthetic construct
  source 1..20: mol_type = other RNA
cttcgggattttgaagacaa

SEQ ID NO: 1761 - RNA, 20 nt, synthetic construct
  source 1..20: mol_type = other RNA
aaccggagaactcttagaat

SEQ ID NO: 1762 - RNA, 20 nt, synthetic construct
  source 1..20: mol_type = other RNA
tcggttctacgcttatggtt

SEQ ID NO: 1763 - RNA, 20 nt, synthetic construct
  source 1..20: mol_type = other RNA
ccaaactcccattctttcat

SEQ ID NO: 1764 - RNA, 20 nt, synthetic construct
  source 1..20: mol_type = other RNA
tcgggattttgaagacaatt

SEQ ID NO: 1765 - RNA, 20 nt, synthetic construct
  source 1..20: mol_type = other RNA
caatggatgataaaatactt

SEQ ID NO: 1766 - RNA, 20 nt, synthetic construct
  source 1..20: mol_type = other RNA
tcggttctacgcttatggtt

SEQ ID NO: 1767 - RNA, 20 nt, synthetic construct
  source 1..20: mol_type = other RNA
aaccggagaactcttagaat

SEQ ID NO: 1768 - RNA, 20 nt, synthetic construct
  source 1..20: mol_type = other RNA
ccaaactcccattctttcat

SEQ ID NO: 1769 - RNA, 20 nt, synthetic construct
  source 1..20: mol_type = other RNA
tcgggattttgaagacaatt

SEQ ID NO: 1770 - RNA, 20 nt, synthetic construct
  source 1..20: mol_type = other RNA
caatggatgataaaatactt

SEQ ID NO: 1771 - RNA, 20 nt, synthetic construct
  source 1..20: mol_type = other RNA
cctcggttctacgcttatgg

SEQ ID NO: 1772 - RNA, 20 nt, synthetic construct
  source 1..20: mol_type = other RNA
gcaaccggagaactcttaga

SEQ ID NO: 1773 - RNA, 20 nt, synthetic construct
  source 1..20: mol_type = other RNA
caccaaactcccattctttc

SEQ ID NO: 1774 - RNA, 20 nt, synthetic construct
  source 1..20: mol_type = other RNA
cttcgggattttgaagacaa

SEQ ID NO: 1775 - RNA, 20 nt, synthetic construct
  source 1..20: mol_type = other RNA
cccaatggatgataaaatac

SEQ ID NO: 1776 - RNA, 20 nt, synthetic construct
  source 1..20: mol_type = other RNA
cctcggttctacgcttatgg

SEQ ID NO: 1777 - RNA, 20 nt, synthetic construct
  source 1..20: mol_type = other RNA
gcaaccggagaactcttaga

SEQ ID NO: 1778 - RNA, 20 nt, synthetic construct
  source 1..20: mol_type = other RNA
caccaaactcccattctttc

SEQ ID NO: 1779 - RNA, 20 nt, synthetic construct
  source 1..20: mol_type = other RNA
cttcgggattttgaagacaa

SEQ ID NO: 1780 - RNA, 20 nt, synthetic construct
  source 1..20: mol_type = other RNA
cccaatggatgataaaatac

SEQ ID NO: 1781 - RNA, 20 nt, synthetic construct
  source 1..20: mol_type = other RNA
cctcggttctacgcttatgg

SEQ ID NO: 1782 - RNA, 20 nt, synthetic construct
  source 1..20: mol_type = other RNA
gcaaccggagaactcttaga

SEQ ID NO: 1783 - RNA, 20 nt, synthetic construct
  source 1..20: mol_type = other RNA
caccaaactcccattctttc

SEQ ID NO: 1784 - RNA, 20 nt, synthetic construct
  source 1..20: mol_type = other RNA
cttcgggattttgaagacaa

SEQ ID NO: 1785 - RNA, 20 nt, synthetic construct
  source 1..20: mol_type = other RNA
accatccgatcagctgtaga

SEQ ID NO: 1786 - RNA, 20 nt, synthetic construct
  source 1..20: mol_type = other RNA
ggtcttgtgaatatggaaag

SEQ ID NO: 1787 - RNA, 20 nt, synthetic construct
  source 1..20: mol_type = other RNA
tgagctatgtgttggaagtg

SEQ ID NO: 1788 - RNA, 20 nt, synthetic construct
  source 1..20: mol_type = other RNA
aagacggtacataatcctac

SEQ ID NO: 1789 - RNA, 20 nt, synthetic construct
  source 1..20: mol_type = other RNA
agtttggaattctttgctct

SEQ ID NO: 1790 - RNA, 20 nt, synthetic construct
  source 1..20: mol_type = other RNA
tttggaattctttgctctac

SEQ ID NO: 1791 - RNA, 20 nt, synthetic construct
  source 1..20: mol_type = other RNA
catccgatcagctgtagaat

SEQ ID NO: 1792 - RNA, 20 nt, synthetic construct
  source 1..20: mol_type = other RNA
tcttgtgaatatggaaagtt

SEQ ID NO: 1793 - RNA, 20 nt, synthetic construct
  source 1..20: mol_type = other RNA
gacggtacataatcctacat

SEQ ID NO: 1794 - RNA, 20 nt, synthetic construct
  source 1..20: mol_type = other RNA
agctatgtgttggaagtgtt

SEQ ID NO: 1795 - RNA, 20 nt, synthetic construct
  source 1..20: mol_type = other RNA
tggaattctttgctctactt

SEQ ID NO: 1796 - RNA, 20 nt, synthetic construct
  source 1..20: mol_type = other RNA
tttggaattctttgctctat

SEQ ID NO: 1797 - RNA, 20 nt, synthetic construct
  source 1..20: mol_type = other RNA
gctataatttcaaggagttt

SEQ ID NO: 1798 - RNA, 20 nt, synthetic construct
  source 1..20: mol_type = other RNA
catccgatcagctgtagaat

SEQ ID NO: 1799 - RNA, 20 nt, synthetic construct
  source 1..20: mol_type = other RNA
tcttgtgaatatggaaagtt

SEQ ID NO: 1800 - RNA, 20 nt, synthetic construct
  source 1..20: mol_type = other RNA
gacggtacataatcctacat

SEQ ID NO: 1801 - RNA, 20 nt, synthetic construct
  source 1..20: mol_type = other RNA
agctatgtgttggaagtgtt

SEQ ID NO: 1802 - RNA, 20 nt, synthetic construct
  source 1..20: mol_type = other RNA
tggaattctttgctctactt

SEQ ID NO: 1803 - RNA, 20 nt, synthetic construct
  source 1..20: mol_type = other RNA
tttggaattctttgctctat

SEQ ID NO: 1804 - RNA, 20 nt, synthetic construct
  source 1..20: mol_type = other RNA
gctataatttcaaggagttt

SEQ ID NO: 1805 - RNA, 20 nt, synthetic construct
  source 1..20: mol_type = other RNA
catccgatcagctgtagaat

SEQ ID NO: 1806 - RNA, 20 nt, synthetic construct
  source 1..20: mol_type = other RNA
tcttgtgaatatggaaagtt

SEQ ID NO: 1807 - RNA, 20 nt, synthetic construct
  source 1..20: mol_type = other RNA
gacggtacataatcctacat

SEQ ID NO: 1808 - RNA, 20 nt, synthetic construct
  source 1..20: mol_type = other RNA
agctatgtgttggaagtgtt

SEQ ID NO: 1809 - RNA, 20 nt, synthetic construct
  source 1..20: mol_type = other RNA
tggaattctttgctctactt

SEQ ID NO: 1810 - RNA, 20 nt, synthetic construct
  source 1..20: mol_type = other RNA
tttggaattctttgctctat

SEQ ID NO: 1811 - RNA, 20 nt, synthetic construct
  source 1..20: mol_type = other RNA
gctataatttcaaggagttt

SEQ ID NO: 1812 - RNA, 20 nt, synthetic construct
  source 1..20: mol_type = other RNA
accatccgatcagctgtaga

SEQ ID NO: 1813 - RNA, 20 nt, synthetic construct
  source 1..20: mol_type = other RNA
ggtcttgtgaatatggaaag

SEQ ID NO: 1814 - RNA, 20 nt, synthetic construct
  source 1..20: mol_type = other RNA
aagacggtacataatcctac

SEQ ID NO: 1815 - RNA, 20 nt, synthetic construct
  source 1..20: mol_type = other RNA
tgagctatgtgttggaagtg

SEQ ID NO: 1816 - RNA, 20 nt, synthetic construct
  source 1..20: mol_type = other RNA
tttggaattctttgctctac

SEQ ID NO: 1817 - RNA, 20 nt, synthetic construct
  source 1..20: mol_type = other RNA
agtttggaattctttgctct

SEQ ID NO: 1818 - RNA, 20 nt, synthetic construct
  source 1..20: mol_type = other RNA
ttgctataatttcaaggagt

SEQ ID NO: 1819 - RNA, 20 nt, synthetic construct
  source 1..20: mol_type = other RNA
accatccgatcagctgtaga

SEQ ID NO: 1820 - RNA, 20 nt, synthetic construct
  source 1..20: mol_type = other RNA
ggtcttgtgaatatggaaag

SEQ ID NO: 1821 - RNA, 20 nt, synthetic construct
  source 1..20: mol_type = other RNA
aagacggtacataatcctac

SEQ ID NO: 1822 - RNA, 20 nt, synthetic construct
  source 1..20: mol_type = other RNA
tgagctatgtgttggaagtg

SEQ ID NO: 1823 - RNA, 20 nt, synthetic construct
  source 1..20: mol_type = other RNA
tttggaattctttgctctac

SEQ ID NO: 1824 - RNA, 20 nt, synthetic construct
  source 1..20: mol_type = other RNA
agtttggaattctttgctct

SEQ ID NO: 1825 - RNA, 20 nt, synthetic construct
  source 1..20: mol_type = other RNA
ttgctataatttcaaggagt

SEQ ID NO: 1826 - RNA, 20 nt, synthetic construct
  source 1..20: mol_type = other RNA
accatccgatcagctgtaga

SEQ ID NO: 1827 - RNA, 20 nt, synthetic construct
  source 1..20: mol_type = other RNA
ggtcttgtgaatatggaaag

SEQ ID NO: 1828 - RNA, 20 nt, synthetic construct
  source 1..20: mol_type = other RNA
aagacggtacataatcctac

SEQ ID NO: 1829 - RNA, 20 nt, synthetic construct
  source 1..20: mol_type = other RNA
tgagctatgtgttggaagtg

SEQ ID NO: 1830 - RNA, 20 nt, synthetic construct
  source 1..20: mol_type = other RNA
tttggaattctttgctctac

SEQ ID NO: 1831 - RNA, 20 nt, synthetic construct
  source 1..20: mol_type = other RNA
agtttggaattctttgctct

SEQ ID NO: 1832 - RNA, 20 nt, synthetic construct
  source 1..20: mol_type = other RNA
ttgctataatttcaaggagt

SEQ ID NO: 1833 - RNA, 20 nt, synthetic construct
  source 1..20: mol_type = other RNA
accaggaaatgtaagacacc

SEQ ID NO: 1834 - RNA, 20 nt, synthetic construct
  source 1..20: mol_type = other RNA
ccaggaaatgtaagacacca

SEQ ID NO: 1835 - RNA, 20 nt, synthetic construct
  source 1..20: mol_type = other RNA
ccctcgtatgttttgaaagt

SEQ ID NO: 1836 - RNA, 20 nt, synthetic construct
  source 1..20: mol_type = other RNA
tttcagttttaaagggtcgt

SEQ ID NO: 1837 - RNA, 20 nt, synthetic construct
  source 1..20: mol_type = other RNA
tcagttttaaagggtcgtga

SEQ ID NO: 1838 - RNA, 20 nt, synthetic construct
  source 1..20: mol_type = other RNA
cagttttaaagggtcgtgag

SEQ ID NO: 1839 - RNA, 20 nt, synthetic construct
  source 1..20: mol_type = other RNA
tttaaagggtcgtgagaaac

SEQ ID NO: 1840 - RNA, 20 nt, synthetic construct
  source 1..20: mol_type = other RNA
ggaagcttgagctatgtgtt

SEQ ID NO: 1841 - RNA, 20 nt, synthetic construct
  source 1..20: mol_type = other RNA
gaagcttgagctatgtgttg

SEQ ID NO: 1842 - RNA, 20 nt, synthetic construct
  source 1..20: mol_type = other RNA
agcttgagctatgtgttgga

SEQ ID NO: 1843 - RNA, 20 nt, synthetic construct
  source 1..20: mol_type = other RNA
gcttgagctatgtgttggaa

SEQ ID NO: 1844 - RNA, 20 nt, synthetic construct
  source 1..20: mol_type = other RNA
cttgagctatgtgttggaag

SEQ ID NO: 1845 - RNA, 20 nt, synthetic construct
  source 1..20: mol_type = other RNA
gagctatgtgttggaagtgc

SEQ ID NO: 1846 - RNA, 20 nt, synthetic construct
  source 1..20: mol_type = other RNA
gtgttggaagtgccctggtt

SEQ ID NO: 1847 - RNA, 20 nt, synthetic construct
  source 1..20: mol_type = other RNA
ggaagtgccctggttttaat

SEQ ID NO: 1848 - RNA, 20 nt, synthetic construct
  source 1..20: mol_type = other RNA
acaaagacggtacataatcc

SEQ ID NO: 1849 - RNA, 20 nt, synthetic construct
  source 1..20: mol_type = other RNA
caaagacggtacataatcct

SEQ ID NO: 1850 - RNA, 20 nt, synthetic construct
  source 1..20: mol_type = other RNA
cataatcctacaggtttaaa

SEQ ID NO: 1851 - RNA, 20 nt, synthetic construct
  source 1..20: mol_type = other RNA
ttgctctactgtttacattg

SEQ ID NO: 1852 - RNA, 20 nt, synthetic construct
  source 1..20: mol_type = other RNA
ttgctataatttcaaggagt

SEQ ID NO: 1853 - RNA, 20 nt, synthetic construct
  source 1..20: mol_type = other RNA
aatgatgcactttaggatgt

SEQ ID NO: 1854 - RNA, 20 nt, synthetic construct
  source 1..20: mol_type = other RNA
atgatgcactttaggatgtt

SEQ ID NO: 1855 - RNA, 20 nt, synthetic construct
  source 1..20: mol_type = other RNA
acatgaatcattcacatgac

SEQ ID NO: 1856 - RNA, 20 nt, synthetic construct
  source 1..20: mol_type = other RNA
catgaatcattcacatgacc

SEQ ID NO: 1857 - RNA, 20 nt, synthetic construct
  source 1..20: mol_type = other RNA
aatacatgtctagtctgtcc

SEQ ID NO: 1858 - RNA, 20 nt, synthetic construct
  source 1..20: mol_type = other RNA
atgtctagtctgtcctttaa

SEQ ID NO: 1859 - RNA, 20 nt, synthetic construct
  source 1..20: mol_type = other RNA
aatcagatcattaccagtta

SEQ ID NO: 1860 - RNA, 20 nt, synthetic construct
  source 1..20: mol_type = other RNA
tcagatcattaccagttagc

SEQ ID NO: 1861 - RNA, 20 nt, synthetic construct
  source 1..20: mol_type = other RNA
agatcattaccagttagctt

SEQ ID NO: 1862 - RNA, 20 nt, synthetic construct
  source 1..20: mol_type = other RNA
tcattaccagttagctttta

SEQ ID NO: 1863 - RNA, 20 nt, synthetic construct
  source 1..20: mol_type = other RNA
accagttagcttttaaagca

SEQ ID NO: 1864 - RNA, 20 nt, synthetic construct
  source 1..20: mol_type = other RNA
aagcacatttgtttaagact

SEQ ID NO: 1865 - RNA, 20 nt, synthetic construct
  source 1..20: mol_type = other RNA
gcacatttgtttaagactat

SEQ ID NO: 1866 - RNA, 20 nt, synthetic construct
  source 1..20: mol_type = other RNA
tgagatgctactaattgttt

SEQ ID NO: 1867 - RNA, 20 nt, synthetic construct
  source 1..20: mol_type = other RNA
gatttattcaggaatcccca

SEQ ID NO: 1868 - RNA, 20 nt, synthetic construct
  source 1..20: mol_type = other RNA
tgctgtgtggccaattataa

SEQ ID NO: 1869 - RNA, 20 nt, synthetic construct
  source 1..20: mol_type = other RNA
atgtaaaactatactgaccc

SEQ ID NO: 1870 - RNA, 20 nt, synthetic construct
  source 1..20: mol_type = other RNA
taaaactatactgacccgtt

SEQ ID NO: 1871 - RNA, 20 nt, synthetic construct
  source 1..20: mol_type = other RNA
gagaaactggctggtccaat

SEQ ID NO: 1872 - RNA, 20 nt, synthetic construct
  source 1..20: mol_type = other RNA
ccaatgggatttacagcaac

SEQ ID NO: 1873 - RNA, 20 nt, synthetic construct
  source 1..20: mol_type = other RNA
agtttgctcttaatcgtatg

SEQ ID NO: 1874 - RNA, 20 nt, synthetic construct
  source 1..20: mol_type = other RNA
gtttgctcttaatcgtatgg

SEQ ID NO: 1875 - RNA, 20 nt, synthetic construct
  source 1..20: mol_type = other RNA
tttgctcttaatcgtatgga

SEQ ID NO: 1876 - RNA, 20 nt, synthetic construct
  source 1..20: mol_type = other RNA
tgctcttaatcgtatggaag

SEQ ID NO: 1877 - RNA, 20 nt, synthetic construct
  source 1..20: mol_type = other RNA
cttaatcgtatggaagcttg

SEQ ID NO: 1878 - RNA, 20 nt, synthetic construct
  source 1..20: mol_type = other RNA
ttaatcgtatggaagcttga

SEQ ID NO: 1879 - RNA, 20 nt, synthetic construct
  source 1..20: mol_type = other RNA
tccatacacaaagacggtac

SEQ ID NO: 1880 - RNA, 20 nt, synthetic construct
  source 1..20: mol_type = other RNA
catacacaaagacggtacat

SEQ ID NO: 1881 - RNA, 20 nt, synthetic construct
  source 1..20: mol_type = other RNA
tgtctagtctgtcctttaat

SEQ ID NO: 1882 - RNA, 20 nt, synthetic construct
  source 1..20: mol_type = other RNA
tctagtctgtcctttaatag

SEQ ID NO: 1883 - RNA, 20 nt, synthetic construct
  source 1..20: mol_type = other RNA
ctagtctgtcctttaatagc

SEQ ID NO: 1884 - RNA, 20 nt, synthetic construct
  source 1..20: mol_type = other RNA
gtctgtcctttaatagctct

SEQ ID NO: 1885 - RNA, 20 nt, synthetic construct
  source 1..20: mol_type = other RNA
gtctgcaaccggagaactct

SEQ ID NO: 1886 - RNA, 20 nt, synthetic construct
  source 1..20: mol_type = other RNA
tctgcaaccggagaactctt

SEQ ID NO: 1887 - RNA, 20 nt, synthetic construct
  source 1..20: mol_type = other RNA
tgcaaccggagaactcttag

SEQ ID NO: 1888 - RNA, 20 nt, synthetic construct
  source 1..20: mol_type = other RNA
aggatgaagttcgacatggg

SEQ ID NO: 1889 - RNA, 20 nt, synthetic construct
  source 1..20: mol_type = other RNA
gggacttatcaacaaagaaa

SEQ ID NO: 1890 - RNA, 20 nt, synthetic construct
  source 1..20: mol_type = other RNA
atactccttctgggttcaac

SEQ ID NO: 1891 - RNA, 20 nt, synthetic construct
  source 1..20: mol_type = other RNA
caagcctaaacgtcagaaat

SEQ ID NO: 1892 - RNA, 20 nt, synthetic construct
  source 1..20: mol_type = other RNA
aagcctaaacgtcagaaatc

SEQ ID NO: 1893 - RNA, 20 nt, synthetic construct
  source 1..20: mol_type = other RNA
ggtggacacactcagcattt

SEQ ID NO: 1894 - RNA, 20 nt, synthetic construct
  source 1..20: mol_type = other RNA
gagctttgtctccgaagtgc

SEQ ID NO: 1895 - RNA, 20 nt, synthetic construct
  source 1..20: mol_type = other RNA
tgtctccgaagtgccccagt

SEQ ID NO: 1896 - RNA, 20 nt, synthetic construct
  source 1..20: mol_type = other RNA
atgctctctcctcggttcta

SEQ ID NO: 1897 - RNA, 20 nt, synthetic construct
  source 1..20: mol_type = other RNA
agctcacacgaaggattcag

SEQ ID NO: 1898 - RNA, 20 nt, synthetic construct
  source 1..20: mol_type = other RNA
agaagaagtacagaccttcc

SEQ ID NO: 1899 - RNA, 20 nt, synthetic construct
  source 1..20: mol_type = other RNA
gaagaagtacagaccttccc

SEQ ID NO: 1900 - RNA, 20 nt, synthetic construct
  source 1..20: mol_type = other RNA
aagaagtacagaccttccca

SEQ ID NO: 1901 - RNA, 20 nt, synthetic construct
  source 1..20: mol_type = other RNA
tctgaaatggacaaatgacc

SEQ ID NO: 1902 - RNA, 20 nt, synthetic construct
  source 1..20: mol_type = other RNA
aaatgaccttgccaaattcc

SEQ ID NO: 1903 - RNA, 20 nt, synthetic construct
  source 1..20: mol_type = other RNA
acctaactcccaggatgcgg

SEQ ID NO: 1904 - RNA, 20 nt, synthetic construct
  source 1..20: mol_type = other RNA
tgcggcagcgaagcaacaca

SEQ ID NO: 1905 - RNA, 20 nt, synthetic construct
  source 1..20: mol_type = other RNA
acggccggtaacaaagaacg

SEQ ID NO: 1906 - RNA, 20 nt, synthetic construct
  source 1..20: mol_type = other RNA
ggccggtaacaaagaacgaa

SEQ ID NO: 1907 - RNA, 20 nt, synthetic construct
  source 1..20: mol_type = other RNA
ggggtcagaagacgatagca

SEQ ID NO: 1908 - RNA, 20 nt, synthetic construct
  source 1..20: mol_type = other RNA
agaaagaaccatccgatcag

SEQ ID NO: 1909 - RNA, 20 nt, synthetic construct
  source 1..20: mol_type = other RNA
gaaccatccgatcagctgta

SEQ ID NO: 1910 - RNA, 20 nt, synthetic construct
  source 1..20: mol_type = other RNA
atctggaacactatcagcat

SEQ ID NO: 1911 - RNA, 20 nt, synthetic construct
  source 1..20: mol_type = other RNA
aagaaaatactccttctggg

SEQ ID NO: 1912 - RNA, 20 nt, synthetic construct
  source 1..20: mol_type = other RNA
actcaggaagtcgaaaaggt

SEQ ID NO: 1913 - RNA, 20 nt, synthetic construct
  source 1..20: mol_type = other RNA
agaaaggagcaagcctaaac

SEQ ID NO: 1914 - RNA, 20 nt, synthetic construct
  source 1..20: mol_type = other RNA
aggagcaagcctaaacgtca

SEQ ID NO: 1915 - RNA, 20 nt, synthetic construct
  source 1..20: mol_type = other RNA
ggagcaagcctaaacgtcag

SEQ ID NO: 1916 - RNA, 20 nt, synthetic construct
  source 1..20: mol_type = other RNA
agcaagcctaaacgtcagaa

SEQ ID NO: 1917 - RNA, 20 nt, synthetic construct
  source 1..20: mol_type = other RNA
gaaagtctcaattccacacg

SEQ ID NO: 1918 - RNA, 20 nt, synthetic construct
  source 1..20: mol_type = other RNA
gtctcaattccacacgatct

SEQ ID NO: 1919 - RNA, 20 nt, synthetic construct
  source 1..20: mol_type = other RNA
tcaattccacacgatctcat

SEQ ID NO: 1920 - RNA, 20 nt, synthetic construct
  source 1..20: mol_type = other RNA
caattccacacgatctcatg

SEQ ID NO: 1921 - RNA, 20 nt, synthetic construct
  source 1..20: mol_type = other RNA
attccacacgatctcatgag

SEQ ID NO: 1922 - RNA, 20 nt, synthetic construct
  source 1..20: mol_type = other RNA
ttccacacgatctcatgaga

SEQ ID NO: 1923 - RNA, 20 nt, synthetic construct
  source 1..20: mol_type = other RNA
tcatgagagaactggacctg

SEQ ID NO: 1924 - RNA, 20 nt, synthetic construct
  source 1..20: mol_type = other RNA
catgagagaactggacctga

SEQ ID NO: 1925 - RNA, 20 nt, synthetic construct
  source 1..20: mol_type = other RNA
atcccagcctatctgacacc

SEQ ID NO: 1926 - RNA, 20 nt, synthetic construct
  source 1..20: mol_type = other RNA
tcccagcctatctgacacca

SEQ ID NO: 1927 - RNA, 20 nt, synthetic construct
  source 1..20: mol_type = other RNA
cccagcctatctgacaccaa

SEQ ID NO: 1928 - RNA, 20 nt, synthetic construct
  source 1..20: mol_type = other RNA
agcagagaaatcaagatgcc

SEQ ID NO: 1929 - RNA, 20 nt, synthetic construct
  source 1..20: mol_type = other RNA
tccgaagtgccccagtcgga

SEQ ID NO: 1930 - RNA, 20 nt, synthetic construct
  source 1..20: mol_type = other RNA
gaagatagattcgaagaaga

SEQ ID NO: 1931 - RNA, 20 nt, synthetic construct
  source 1..20: mol_type = other RNA
cagcgaagcaacacactccc

SEQ ID NO: 1932 - RNA, 20 nt, synthetic construct
  source 1..20: mol_type = other RNA
gcgaagcaacacactcccca

SEQ ID NO: 1933 - RNA, 20 nt, synthetic construct
  source 1..20: mol_type = other RNA
ttgaagccacattggaatct

SEQ ID NO: 1934 - RNA, 20 nt, synthetic construct
  source 1..20: mol_type = other RNA
cggtaacaaagaacgaacgg

SEQ ID NO: 1935 - RNA, 20 nt, synthetic construct
  source 1..20: mol_type = other RNA
atgaagccactatacgacag

SEQ ID NO: 1936 - RNA, 20 nt, synthetic construct
  source 1..20: mol_type = other RNA
cactatacgacaggtaccgg

SEQ ID NO: 1937 - RNA, 20 nt, synthetic construct
  source 1..20: mol_type = other RNA
ttgctataatttcaaggagt

SEQ ID NO: 1938 - RNA, 23 nt, synthetic construct
  source 1..23: mol_type = other RNA
attgctgacttggggtacatgtt

SEQ ID NO: 1939 - RNA, 23 nt, synthetic construct
  source 1..23: mol_type = other RNA
acattgctgacttggggtacatt

SEQ ID NO: 1940 - RNA, 23 nt, synthetic construct
  source 1..23: mol_type = other RNA
aacattgctgacttggggtactt

SEQ ID NO: 1941 - RNA, 23 nt, synthetic construct
  source 1..23: mol_type = other RNA
atccggttgcagacacattgctt

SEQ ID NO: 1942 - RNA, 23 nt, synthetic construct
  source 1..23: mol_type = other RNA
tctccggttgcagacacattgtt

SEQ ID NO: 1943 - RNA, 23 nt, synthetic construct
  source 1..23: mol_type = other RNA
ttctccggttgcagacacatttt

SEQ ID NO: 1944 - RNA, 23 nt, synthetic construct
  source 1..23: mol_type = other RNA
agttctccggttgcagacacatt

SEQ ID NO: 1945 - RNA, 23 nt, synthetic construct
  source 1..23: mol_type = other RNA
aagttctccggttgcagacactt

SEQ ID NO: 1946 - RNA, 23 nt, synthetic construct
  source 1..23: mol_type = other RNA
agagttctccggttgcagacatt

SEQ ID NO: 1947 - RNA, 23 nt, synthetic construct
  source 1..23: mol_type = other RNA
aagagttctccggttgcagactt

SEQ ID NO: 1948 - RNA, 23 nt, synthetic construct
  source 1..23: mol_type = other RNA
taagagttctccggttgcagatt

SEQ ID NO: 1949 - RNA, 23 nt, synthetic construct
  source 1..23: mol_type = other RNA
ataagagttctccggttgcagtt

SEQ ID NO: 1950 - RNA, 23 nt, synthetic construct
  source 1..23: mol_type = other RNA
tctaagagttctccggttgcatt

SEQ ID NO: 1951 - RNA, 23 nt, synthetic construct
  source 1..23: mol_type = other RNA
ttctaagagttctccggttgctt

SEQ ID NO: 1952 - RNA, 23 nt, synthetic construct
  source 1..23: mol_type = other RNA
atttctaagagttctccggtttt

SEQ ID NO: 1953 - RNA, 23 nt, synthetic construct
  source 1..23: mol_type = other RNA
atcggatggttctttctaagatt

SEQ ID NO: 1954 - RNA, 23 nt, synthetic construct
  source 1..23: mol_type = other RNA
aatcggatggttctttctaagtt

SEQ ID NO: 1955 - RNA, 23 nt, synthetic construct
  source 1..23: mol_type = other RNA
tgatcggatggttctttctaatt

SEQ ID NO: 1956 - RNA, 23 nt, synthetic construct
  source 1..23: mol_type = other RNA
actgatcggatggttctttcttt

SEQ ID NO: 1957 - RNA, 23 nt, synthetic construct
  source 1..23: mol_type = other RNA
aagctgatcggatggttcttttt

SEQ ID NO: 1958 - RNA, 23 nt, synthetic construct
  source 1..23: mol_type = other RNA
acagctgatcggatggttctttt

SEQ ID NO: 1959 - RNA, 23 nt, synthetic construct
  source 1..23: mol_type = other RNA
atacagctgatcggatggttctt

SEQ ID NO: 1960 - RNA, 23 nt, synthetic construct
  source 1..23: mol_type = other RNA
ttctacagctgatcggatggttt

SEQ ID NO: 1961 - RNA, 23 nt, synthetic construct
  source 1..23: mol_type = other RNA
tgttgttctacagctgatcggtt

SEQ ID NO: 1962 - RNA, 23 nt, synthetic construct
  source 1..23: mol_type = other RNA
acctccagagttattaacatctt

SEQ ID NO: 1963 - RNA, 23 nt, synthetic construct
  source 1..23: mol_type = other RNA
atttgacctccagagttattatt

SEQ ID NO: 1964 - RNA, 23 nt, synthetic construct
  source 1..23: mol_type = other RNA
aactttgacctccagagttattt

SEQ ID NO: 1965 - RNA, 23 nt, synthetic construct
  source 1..23: mol_type = other RNA
aatgctgatagtgttccagattt

SEQ ID NO: 1966 - RNA, 23 nt, synthetic construct
  source 1..23: mol_type = other RNA
tcccatgtcgaacttcatccttt

SEQ ID NO: 1967 - RNA, 23 nt, synthetic construct
  source 1..23: mol_type = other RNA
attgtctctcccatgtcgaactt

SEQ ID NO: 1968 - RNA, 23 nt, synthetic construct
  source 1..23: mol_type = other RNA
tcccttgtctctcccatgtcgtt

SEQ ID NO: 1969 - RNA, 23 nt, synthetic construct
  source 1..23: mol_type = other RNA
agtcccttgtctctcccatgttt

SEQ ID NO: 1970 - RNA, 23 nt, synthetic construct
  source 1..23: mol_type = other RNA
taagtcccttgtctctcccattt

SEQ ID NO: 1971 - RNA, 23 nt, synthetic construct
  source 1..23: mol_type = other RNA
aataagtcccttgtctctccctt

SEQ ID NO: 1972 - RNA, 23 nt, synthetic construct
  source 1..23: mol_type = other RNA
tgataagtcccttgtctctcctt

SEQ ID NO: 1973 - RNA, 23 nt, synthetic construct
  source 1..23: mol_type = other RNA
ttgataagtcccttgtctctctt

SEQ ID NO: 1974 - RNA, 23 nt, synthetic construct
  source 1..23: mol_type = other RNA
tttgttgataagtcccttgtctt

SEQ ID NO: 1975 - RNA, 23 nt, synthetic construct
  source 1..23: mol_type = other RNA
atttgttgataagtcccttgttt

SEQ ID NO: 1976 - RNA, 23 nt, synthetic construct
  source 1..23: mol_type = other RNA
ttttctttgttgataagtccctt

SEQ ID NO: 1977 - RNA, 23 nt, synthetic construct
  source 1..23: mol_type = other RNA
acccagaaggagtattttctttt

SEQ ID NO: 1978 - RNA, 23 nt, synthetic construct
  source 1..23: mol_type = other RNA
agttgaacccagaaggagtattt

SEQ ID NO: 1979 - RNA, 23 nt, synthetic construct
  source 1..23: mol_type = other RNA
aaatcatcaaggtggttgaactt

SEQ ID NO: 1980 - RNA, 23 nt, synthetic construct
  source 1..23: mol_type = other RNA
acaatcatcaaggtggttgaatt

SEQ ID NO: 1981 - RNA, 23 nt, synthetic construct
  source 1..23: mol_type = other RNA
ttcgacttcctgagtattcaatt

SEQ ID NO: 1982 - RNA, 23 nt, synthetic construct
  source 1..23: mol_type = other RNA
taccttttcgacttcctgagttt

SEQ ID NO: 1983 - RNA, 23 nt, synthetic construct
  source 1..23: mol_type = other RNA
ataccttttcgacttcctgagtt

SEQ ID NO: 1984 - RNA, 23 nt, synthetic construct
  source 1..23: mol_type = other RNA
tgtaccttttcgacttcctgatt

SEQ ID NO: 1985 - RNA, 23 nt, synthetic construct
  source 1..23: mol_type = other RNA
tgtgtaccttttcgacttccttt

SEQ ID NO: 1986 - RNA, 23 nt, synthetic construct
  source 1..23: mol_type = other RNA
tatttttgtgtaccttttcgatt

SEQ ID NO: 1987 - RNA, 23 nt, synthetic construct
  source 1..23: mol_type = other RNA
atatttttgtgtaccttttcgtt

SEQ ID NO: 1988 - RNA, 23 nt, synthetic construct
  source 1..23: mol_type = other RNA
atttaggcttgctcctttctctt

SEQ ID NO: 1989 - RNA, 23 nt, synthetic construct
  source 1..23: mol_type = other RNA
agtttaggcttgctcctttcttt

SEQ ID NO: 1990 - RNA, 23 nt, synthetic construct
  source 1..23: mol_type = other RNA
acgtttaggcttgctcctttctt

SEQ ID NO: 1991 - RNA, 23 nt, synthetic construct
  source 1..23: mol_type = other RNA
atgacgtttaggcttgctccttt

SEQ ID NO: 1992 - RNA, 23 nt, synthetic construct
  source 1..23: mol_type = other RNA
tctgacgtttaggcttgctcctt

SEQ ID NO: 1993 - RNA, 23 nt, synthetic construct
  source 1..23: mol_type = other RNA
ttctgacgtttaggcttgctctt

SEQ ID NO: 1994 - RNA, 23 nt, synthetic construct
  source 1..23: mol_type = other RNA
tttctgacgtttaggcttgcttt

SEQ ID NO: 1995 - RNA, 23 nt, synthetic construct
  source 1..23: mol_type = other RNA
atttctgacgtttaggcttgctt

SEQ ID NO: 1996 - RNA, 23 nt, synthetic construct
  source 1..23: mol_type = other RNA
aatttctgacgtttaggcttgtt

SEQ ID NO: 1997 - RNA, 23 nt, synthetic construct
  source 1..23: mol_type = other RNA
agatttctgacgtttaggctttt

SEQ ID NO: 1998 - RNA, 23 nt, synthetic construct
  source 1..23: mol_type = other RNA
atttagtactggatttctgactt

SEQ ID NO: 1999 - RNA, 23 nt, synthetic construct
  source 1..23: mol_type = other RNA
agtttagtactggatttctgatt

SEQ ID NO: 2000 - RNA, 23 nt, synthetic construct
  source 1..23: mol_type = other RNA
aattgtcatgaagctcagaaatt

SEQ ID NO: 2001 - RNA, 23 nt, synthetic construct
  source 1..23: mol_type = other RNA
agtcctgattgtcatgaagcttt

SEQ ID NO: 2002 - RNA, 23 nt, synthetic construct
  source 1..23: mol_type = other RNA
aaccgtcctgattgtcatgaatt

SEQ ID NO: 2003 - RNA, 23 nt, synthetic construct
  source 1..23: mol_type = other RNA
agaccgtcctgattgtcatgatt

SEQ ID NO: 2004 - RNA, 23 nt, synthetic construct
  source 1..23: mol_type = other RNA
aagaccgtcctgattgtcatgtt

SEQ ID NO: 2005 - RNA, 23 nt, synthetic construct
  source 1..23: mol_type = other RNA
aaagaccgtcctgattgtcattt

SEQ ID NO: 2006 - RNA, 23 nt, synthetic construct
  source 1..23: mol_type = other RNA
acaagaccgtcctgattgtcatt

SEQ ID NO: 2007 - RNA, 23 nt, synthetic construct
  source 1..23: mol_type = other RNA
aacaagaccgtcctgattgtctt

SEQ ID NO: 2008 - RNA, 23 nt, synthetic construct
  source 1..23: mol_type = other RNA
tcacaagaccgtcctgattgttt

SEQ ID NO: 2009 - RNA, 23 nt, synthetic construct
  source 1..23: mol_type = other RNA
attcacaagaccgtcctgatttt

SEQ ID NO: 2010 - RNA, 23 nt, synthetic construct
  source 1..23: mol_type = other RNA
tattcacaagaccgtcctgattt

SEQ ID NO: 2011 - RNA, 23 nt, synthetic construct
  source 1..23: mol_type = other RNA
atattcacaagaccgtcctgatt

SEQ ID NO: 2012 - RNA, 23 nt, synthetic construct
  source 1..23: mol_type = other RNA
actttccatattcacaagacctt

SEQ ID NO: 2013 - RNA, 23 nt, synthetic construct
  source 1..23: mol_type = other RNA
tcgtgtggaattgagactttctt

SEQ ID NO: 2014 - RNA, 23 nt, synthetic construct
  source 1..23: mol_type = other RNA
atcgtgtggaattgagacttttt

SEQ ID NO: 2015 - RNA, 23 nt, synthetic construct
  source 1..23: mol_type = other RNA
aatcgtgtggaattgagactttt

SEQ ID NO: 2016 - RNA, 23 nt, synthetic construct
  source 1..23: mol_type = other RNA
agatcgtgtggaattgagacttt

SEQ ID NO: 2017 - RNA, 23 nt, synthetic construct
  source 1..23: mol_type = other RNA
aagatcgtgtggaattgagactt

SEQ ID NO: 2018 - RNA, 23 nt, synthetic construct
  source 1..23: mol_type = other RNA
tgagatcgtgtggaattgagatt

SEQ ID NO: 2019 - RNA, 23 nt, synthetic construct
  source 1..23: mol_type = other RNA
atgagatcgtgtggaattgagtt

SEQ ID NO: 2020 - RNA, 23 nt, synthetic construct
  source 1..23: mol_type = other RNA
aatgagatcgtgtggaattgatt

SEQ ID NO: 2021 - RNA, 23 nt, synthetic construct
  source 1..23: mol_type = other RNA
tcatgagatcgtgtggaattgtt

SEQ ID NO: 2022 - RNA, 23 nt, synthetic construct
  source 1..23: mol_type = other RNA
tctcatgagatcgtgtggaattt

SEQ ID NO: 2023 - RNA, 23 nt, synthetic construct
  source 1..23: mol_type = other RNA
atctcatgagatcgtgtggaatt

SEQ ID NO: 2024 - RNA, 23 nt, synthetic construct
  source 1..23: mol_type = other RNA
tctctcatgagatcgtgtggatt

SEQ ID NO: 2025 - RNA, 23 nt, synthetic construct
  source 1..23: mol_type = other RNA
aagttctctcatgagatcgtgtt

SEQ ID NO: 2026 - RNA, 23 nt, synthetic construct
  source 1..23: mol_type = other RNA
aggtccagttctctcatgagatt

SEQ ID NO: 2027 - RNA, 23 nt, synthetic construct
  source 1..23: mol_type = other RNA
tcaggtccagttctctcatgatt

SEQ ID NO: 2028 - RNA, 23 nt, synthetic construct
  source 1..23: mol_type = other RNA
atcaggtccagttctctcatgtt

SEQ ID NO: 2029 - RNA, 23 nt, synthetic construct
  source 1..23: mol_type = other RNA
tttcatcagacatccattcaatt

SEQ ID NO: 2030 - RNA, 23 nt, synthetic construct
  source 1..23: mol_type = other RNA
aaaatgctgagtgtgtccacctt

SEQ ID NO: 2031 - RNA, 23 nt, synthetic construct
  source 1..23: mol_type = other RNA
attcattgtggggctctcaaatt

SEQ ID NO: 2032 - RNA, 23 nt, synthetic construct
  source 1..23: mol_type = other RNA
tggtgtcagataggctgggattt

SEQ ID NO: 2033 - RNA, 23 nt, synthetic construct
  source 1..23: mol_type = other RNA
ttggtgtcagataggctgggatt

SEQ ID NO: 2034 - RNA, 23 nt, synthetic construct
  source 1..23: mol_type = other RNA
tttggtgtcagataggctgggtt

SEQ ID NO: 2035 - RNA, 23 nt, synthetic construct
  source 1..23: mol_type = other RNA
atttggtgtcagataggctggtt

SEQ ID NO: 2036 - RNA, 23 nt, synthetic construct
  source 1..23: mol_type = other RNA
tgtttggtgtcagataggctgtt

SEQ ID NO: 2037 - RNA, 23 nt, synthetic construct
  source 1..23: mol_type = other RNA
aggcatcttgatttctctgcttt

SEQ ID NO: 2038 - RNA, 23 nt, synthetic construct
  source 1..23: mol_type = other RNA
agcacttcggagacaaagctctt

SEQ ID NO: 2039 - RNA, 23 nt, synthetic construct
  source 1..23: mol_type = other RNA
aactggggcacttcggagacatt

SEQ ID NO: 2040 - RNA, 23 nt, synthetic construct
  source 1..23: mol_type = other RNA
tccgactggggcacttcggagtt

SEQ ID NO: 2041 - RNA, 23 nt, synthetic construct
  source 1..23: mol_type = other RNA
atccgactggggcacttcggatt

SEQ ID NO: 2042 - RNA, 23 nt, synthetic construct
  source 1..23: mol_type = other RNA
agataggctcttcccagttcttt

SEQ ID NO: 2043 - RNA, 23 nt, synthetic construct
  source 1..23: mol_type = other RNA
aggataggctcttcccagttctt

SEQ ID NO: 2044 - RNA, 23 nt, synthetic construct
  source 1..23: mol_type = other RNA
agaaagcagggataggctctttt

SEQ ID NO: 2045 - RNA, 23 nt, synthetic construct
  source 1..23: mol_type = other RNA
aacggatcaggcgcccagccttt

SEQ ID NO: 2046 - RNA, 23 nt, synthetic construct
  source 1..23: mol_type = other RNA
tgacggatcaggcgcccagcctt

SEQ ID NO: 2047 - RNA, 23 nt, synthetic construct
  source 1..23: mol_type = other RNA
atgacggatcaggcgcccagctt

SEQ ID NO: 2048 - RNA, 23 nt, synthetic construct
  source 1..23: mol_type = other RNA
actgacggatcaggcgcccagtt

SEQ ID NO: 2049 - RNA, 23 nt, synthetic construct
  source 1..23: mol_type = other RNA
agctgacggatcaggcgcccatt

SEQ ID NO: 2050 - RNA, 23 nt, synthetic construct
  source 1..23: mol_type = other RNA
agggtcgctgtcttcgtccagtt

SEQ ID NO: 2051 - RNA, 23 nt, synthetic construct
  source 1..23: mol_type = other RNA
accgaggagagagcatggggttt

SEQ ID NO: 2052 - RNA, 23 nt, synthetic construct
  source 1..23: mol_type = other RNA
tagaaccgaggagagagcatgtt

SEQ ID NO: 2053 - RNA, 23 nt, synthetic construct
  source 1..23: mol_type = other RNA
atagaaccgaggagagagcattt

SEQ ID NO: 2054 - RNA, 23 nt, synthetic construct
  source 1..23: mol_type = other RNA
acgtagaaccgaggagagagctt

SEQ ID NO: 2055 - RNA, 23 nt, synthetic construct
  source 1..23: mol_type = other RNA
agcgtagaaccgaggagagagtt

SEQ ID NO: 2056 - RNA, 23 nt, synthetic construct
  source 1..23: mol_type = other RNA
aagcgtagaaccgaggagagatt

SEQ ID NO: 2057 - RNA, 23 nt, synthetic construct
  source 1..23: mol_type = other RNA
taagcgtagaaccgaggagagtt

SEQ ID NO: 2058 - RNA, 23 nt, synthetic construct
  source 1..23: mol_type = other RNA
ataagcgtagaaccgaggagatt

SEQ ID NO: 2059 - RNA, 23 nt, synthetic construct
  source 1..23: mol_type = other RNA
aataagcgtagaaccgaggagtt

SEQ ID NO: 2060 - RNA, 23 nt, synthetic construct
  source 1..23: mol_type = other RNA
acataagcgtagaaccgaggatt

SEQ ID NO: 2061 - RNA, 23 nt, synthetic construct
  source 1..23: mol_type = other RNA
accataagcgtagaaccgaggtt

SEQ ID NO: 2062 - RNA, 23 nt, synthetic construct
  source 1..23: mol_type = other RNA
acccataagcgtagaaccgagtt

SEQ ID NO: 2063 - RNA, 23 nt, synthetic construct
  source 1..23: mol_type = other RNA
tgaaagaatgggagtttggtgtt

SEQ ID NO: 2064 - RNA, 23 nt, synthetic construct
  source 1..23: mol_type = other RNA
aatgaaagaatgggagtttggtt

SEQ ID NO: 2065 - RNA, 23 nt, synthetic construct
  source 1..23: mol_type = other RNA
agcctcatgaaagaatgggagtt

SEQ ID NO: 2066 - RNA, 23 nt, synthetic construct
  source 1..23: mol_type = other RNA
tcgccgcctcatgaaagaatgtt

SEQ ID NO: 2067 - RNA, 23 nt, synthetic construct
  source 1..23: mol_type = other RNA
ttcgccgcctcatgaaagaattt

SEQ ID NO: 2068 - RNA, 23 nt, synthetic construct
  source 1..23: mol_type = other RNA
attcgccgcctcatgaaagaatt

SEQ ID NO: 2069 - RNA, 23 nt, synthetic construct
  source 1..23: mol_type = other RNA
acttcgccgcctcatgaaagatt

SEQ ID NO: 2070 - RNA, 23 nt, synthetic construct
  source 1..23: mol_type = other RNA
agcttcgccgcctcatgaaagtt

SEQ ID NO: 2071 - RNA, 23 nt, synthetic construct
  source 1..23: mol_type = other RNA
aagcttcgccgcctcatgaaatt

SEQ ID NO: 2072 - RNA, 23 nt, synthetic construct
  source 1..23: mol_type = other RNA
atcatcataggaccccagagatt

SEQ ID NO: 2073 - RNA, 23 nt, synthetic construct
  source 1..23: mol_type = other RNA
tcgtgtgagctgggcaggtgttt

SEQ ID NO: 2074 - RNA, 23 nt, synthetic construct
  source 1..23: mol_type = other RNA
ttcgtgtgagctgggcaggtgtt

SEQ ID NO: 2075 - RNA, 23 nt, synthetic construct
  source 1..23: mol_type = other RNA
acttcgtgtgagctgggcaggtt

SEQ ID NO: 2076 - RNA, 23 nt, synthetic construct
  source 1..23: mol_type = other RNA
tgaatccttcgtgtgagctggtt

SEQ ID NO: 2077 - RNA, 23 nt, synthetic construct
  source 1..23: mol_type = other RNA
tctgaatccttcgtgtgagcttt

SEQ ID NO: 2078 - RNA, 23 nt, synthetic construct
  source 1..23: mol_type = other RNA
tctatcttcaaacttccggattt

SEQ ID NO: 2079 - RNA, 23 nt, synthetic construct
  source 1..23: mol_type = other RNA
aaatctatcttcaaacttccgtt

SEQ ID NO: 2080 - RNA, 23 nt, synthetic construct
  source 1..23: mol_type = other RNA
attcgaatctatcttcaaacttt

SEQ ID NO: 2081 - RNA, 23 nt, synthetic construct
  source 1..23: mol_type = other RNA
tcttcgaatctatcttcaaactt

SEQ ID NO: 2082 - RNA, 23 nt, synthetic construct
  source 1..23: mol_type = other RNA
atcttcttcgaatctatcttctt

SEQ ID NO: 2083 - RNA, 23 nt, synthetic construct
  source 1..23: mol_type = other RNA
aggaaggtctgtacttcttcttt

SEQ ID NO: 2084 - RNA, 23 nt, synthetic construct
  source 1..23: mol_type = other RNA
tgggaaggtctgtacttcttctt

SEQ ID NO: 2085 - RNA, 23 nt, synthetic construct
  source 1..23: mol_type = other RNA
atgggaaggtctgtacttctttt

SEQ ID NO: 2086 - RNA, 23 nt, synthetic construct
  source 1..23: mol_type = other RNA
aggtcatttgtccatttcagatt

SEQ ID NO: 2087 - RNA, 23 nt, synthetic construct
  source 1..23: mol_type = other RNA
aaggtcatttgtccatttcagtt

SEQ ID NO: 2088 - RNA, 23 nt, synthetic construct
  source 1..23: mol_type = other RNA
aaatttggcaaggtcatttgttt

SEQ ID NO: 2089 - RNA, 23 nt, synthetic construct
  source 1..23: mol_type = other RNA
aggaatttggcaaggtcattttt

SEQ ID NO: 2090 - RNA, 23 nt, synthetic construct
  source 1..23: mol_type = other RNA
acggaatttggcaaggtcatttt

SEQ ID NO: 2091 - RNA, 23 nt, synthetic construct
  source 1..23: mol_type = other RNA
atccggaatttggcaaggtcatt

SEQ ID NO: 2092 - RNA, 23 nt, synthetic construct
  source 1..23: mol_type = other RNA
tctccggaatttggcaaggtctt

SEQ ID NO: 2093 - RNA, 23 nt, synthetic construct
  source 1..23: mol_type = other RNA
atctccggaatttggcaaggttt

SEQ ID NO: 2094 - RNA, 23 nt, synthetic construct
  source 1..23: mol_type = other RNA
tgtctccggaatttggcaaggtt

SEQ ID NO: 2095 - RNA, 23 nt, synthetic construct
  source 1..23: mol_type = other RNA
aattctttaagttgtctccggtt

SEQ ID NO: 2096 - RNA, 23 nt, synthetic construct
  source 1..23: mol_type = other RNA
tgattctttaagttgtctccgtt

SEQ ID NO: 2097 - RNA, 23 nt, synthetic construct
  source 1..23: mol_type = other RNA
ttaggtcctcttcagatatcttt

SEQ ID NO: 2098 - RNA, 23 nt, synthetic construct
  source 1..23: mol_type = other RNA
aatcctgggagttaggtcctctt

SEQ ID NO: 2099 - RNA, 23 nt, synthetic construct
  source 1..23: mol_type = other RNA
acgcatcctgggagttaggtctt

SEQ ID NO: 2100 - RNA, 23 nt, synthetic construct
  source 1..23: mol_type = other RNA
accgcatcctgggagttaggttt

SEQ ID NO: 2101 - RNA, 23 nt, synthetic construct
  source 1..23: mol_type = other RNA
atgtgttgcttcgctgccgcatt

SEQ ID NO: 2102 - RNA, 23 nt, synthetic construct
  source 1..23: mol_type = other RNA
agtgtgttgcttcgctgccgctt

SEQ ID NO: 2103 - RNA, 23 nt, synthetic construct
  source 1..23: mol_type = other RNA
agggagtgtgttgcttcgctgtt

SEQ ID NO: 2104 - RNA, 23 nt, synthetic construct
  source 1..23: mol_type = other RNA
ttggggagtgtgttgcttcgctt

SEQ ID NO: 2105 - RNA, 23 nt, synthetic construct
  source 1..23: mol_type = other RNA
aactcttggggagtgtgttgctt

SEQ ID NO: 2106 - RNA, 23 nt, synthetic construct
  source 1..23: mol_type = other RNA
agttgggaaccaaaactcttgtt

SEQ ID NO: 2107 - RNA, 23 nt, synthetic construct
  source 1..23: mol_type = other RNA
tcaagttgggaaccaaaactctt

SEQ ID NO: 2108 - RNA, 23 nt, synthetic construct
  source 1..23: mol_type = other RNA
tctcaagttgggaaccaaaactt

SEQ ID NO: 2109 - RNA, 23 nt, synthetic construct
  source 1..23: mol_type = other RNA
tagattccaatgtggcttcaatt

SEQ ID NO: 2110 - RNA, 23 nt, synthetic construct
  source 1..23: mol_type = other RNA
atttccgctcgcttctcctggtt

SEQ ID NO: 2111 - RNA, 23 nt, synthetic construct
  source 1..23: mol_type = other RNA
tttctcattagcaatctggtctt

SEQ ID NO: 2112 - RNA, 23 nt, synthetic construct
  source 1..23: mol_type = other RNA
aagagccactttctcattagctt

SEQ ID NO: 2113 - RNA, 23 nt, synthetic construct
  source 1..23: mol_type = other RNA
taccggccgtccatgaatgcttt

SEQ ID NO: 2114 - RNA, 23 nt, synthetic construct
  source 1..23: mol_type = other RNA
ttaccggccgtccatgaatgctt

SEQ ID NO: 2115 - RNA, 23 nt, synthetic construct
  source 1..23: mol_type = other RNA
attaccggccgtccatgaatgtt

SEQ ID NO: 2116 - RNA, 23 nt, synthetic construct
  source 1..23: mol_type = other RNA
tgttaccggccgtccatgaattt

SEQ ID NO: 2117 - RNA, 23 nt, synthetic construct
  source 1..23: mol_type = other RNA
ttgttaccggccgtccatgaatt

SEQ ID NO: 2118 - RNA, 23 nt, synthetic construct
  source 1..23: mol_type = other RNA
tttgttaccggccgtccatgatt

SEQ ID NO: 2119 - RNA, 23 nt, synthetic construct
  source 1..23: mol_type = other RNA
tctttgttaccggccgtccattt

SEQ ID NO: 2120 - RNA, 23 nt, synthetic construct
  source 1..23: mol_type = other RNA
ttctttgttaccggccgtccatt

SEQ ID NO: 2121 - RNA, 23 nt, synthetic construct
  source 1..23: mol_type = other RNA
attctttgttaccggccgtcctt

SEQ ID NO: 2122 - RNA, 23 nt, synthetic construct
  source 1..23: mol_type = other RNA
tcgttctttgttaccggccgttt

SEQ ID NO: 2123 - RNA, 23 nt, synthetic construct
  source 1..23: mol_type = other RNA
ttcgttctttgttaccggccgtt

SEQ ID NO: 2124 - RNA, 23 nt, synthetic construct
  source 1..23: mol_type = other RNA
attcgttctttgttaccggcctt

SEQ ID NO: 2125 - RNA, 23 nt, synthetic construct
  source 1..23: mol_type = other RNA
agttcgttctttgttaccggctt

SEQ ID NO: 2126 - RNA, 23 nt, synthetic construct
  source 1..23: mol_type = other RNA
acgttcgttctttgttaccggtt

SEQ ID NO: 2127 - RNA, 23 nt, synthetic construct
  source 1..23: mol_type = other RNA
accgttcgttctttgttaccgtt

SEQ ID NO: 2128 - RNA, 23 nt, synthetic construct
  source 1..23: mol_type = other RNA
tgccgttcgttctttgttacctt

SEQ ID NO: 2129 - RNA, 23 nt, synthetic construct
  source 1..23: mol_type = other RNA
atcacctgccgttcgttcttttt

SEQ ID NO: 2130 - RNA, 23 nt, synthetic construct
  source 1..23: mol_type = other RNA
actgtcgtatagtggcttcattt

SEQ ID NO: 2131 - RNA, 23 nt, synthetic construct
  source 1..23: mol_type = other RNA
tacctgtcgtatagtggcttctt

SEQ ID NO: 2132 - RNA, 23 nt, synthetic construct
  source 1..23: mol_type = other RNA
atacctgtcgtatagtggctttt

SEQ ID NO: 2133 - RNA, 23 nt, synthetic construct
  source 1..23: mol_type = other RNA
agtacctgtcgtatagtggcttt

SEQ ID NO: 2134 - RNA, 23 nt, synthetic construct
  source 1..23: mol_type = other RNA
aggtacctgtcgtatagtggctt

SEQ ID NO: 2135 - RNA, 23 nt, synthetic construct
  source 1..23: mol_type = other RNA
acggtacctgtcgtatagtggtt

SEQ ID NO: 2136 - RNA, 23 nt, synthetic construct
  source 1..23: mol_type = other RNA
accggtacctgtcgtatagtgtt

SEQ ID NO: 2137 - RNA, 23 nt, synthetic construct
  source 1..23: mol_type = other RNA
agccggtacctgtcgtatagttt

SEQ ID NO: 2138 - RNA, 23 nt, synthetic construct
  source 1..23: mol_type = other RNA
tagctcgggagaggatctgtttt

SEQ ID NO: 2139 - RNA, 23 nt, synthetic construct
  source 1..23: mol_type = other RNA
ttagctcgggagaggatctgttt

SEQ ID NO: 2140 - RNA, 23 nt, synthetic construct
  source 1..23: mol_type = other RNA
tgttagctcgggagaggatcttt

SEQ ID NO: 2141 - RNA, 23 nt, synthetic construct
  source 1..23: mol_type = other RNA
tggtgttagctcgggagaggatt

SEQ ID NO: 2142 - RNA, 23 nt, synthetic construct
  source 1..23: mol_type = other RNA
atggtgttagctcgggagaggtt

SEQ ID NO: 2143 - RNA, 23 nt, synthetic construct
  source 1..23: mol_type = other RNA
tatggtgttagctcgggagagtt

SEQ ID NO: 2144 - RNA, 23 nt, synthetic construct
  source 1..23: mol_type = other RNA
aggtatggtgttagctcgggatt

SEQ ID NO: 2145 - RNA, 23 nt, synthetic construct
  source 1..23: mol_type = other RNA
tgggtatggtgttagctcgggtt

SEQ ID NO: 2146 - RNA, 23 nt, synthetic construct
  source 1..23: mol_type = other RNA
ttgctatcgtcttctgacccctt

SEQ ID NO: 2147 - RNA, 23 nt, synthetic construct
  source 1..23: mol_type = other RNA
attgctatcgtcttctgaccctt

SEQ ID NO: 2148 - RNA, 23 nt, synthetic construct
  source 1..23: mol_type = other RNA
acattgctatcgtcttctgactt

SEQ ID NO: 2149 - RNA, 23 nt, synthetic construct
  source 1..23: mol_type = other RNA
aacattgctatcgtcttctgatt

SEQ ID NO: 2150 - RNA, 23 nt, synthetic construct
  source 1..23: mol_type = other RNA
attcacattgctatcgtcttctt

SEQ ID NO: 2151 - RNA, 23 nt, synthetic construct
  source 1..23: mol_type = other RNA
agcttcacattgctatcgtcttt

SEQ ID NO: 2152 - RNA, 23 nt, synthetic construct
  source 1..23: mol_type = other RNA
atcggttttcagagtgaccattt

SEQ ID NO: 2153 - RNA, 23 nt, synthetic construct
  source 1..23: mol_type = other RNA
aatcggttttcagagtgaccatt

SEQ ID NO: 2154 - RNA, 23 nt, synthetic construct
  source 1..23: mol_type = other RNA
aaatcggttttcagagtgacctt

SEQ ID NO: 2155 - RNA, 23 nt, synthetic construct
  source 1..23: mol_type = other RNA
agtgcactgaaatcggttttctt

SEQ ID NO: 2156 - RNA, 23 nt, synthetic construct
  source 1..23: mol_type = other RNA
aatcgtgcactgaaatcggtttt

SEQ ID NO: 2157 - RNA, 23 nt, synthetic construct
  source 1..23: mol_type = other RNA
ttatcatccattggggaaatatt

SEQ ID NO: 2158 - RNA, 23 nt, synthetic construct
  source 1..23: mol_type = other RNA
agtattttatcatccattgggtt

SEQ ID NO: 2159 - RNA, 23 nt, synthetic construct
  source 1..23: mol_type = other RNA
atggtattttatcatccattgtt

SEQ ID NO: 2160 - RNA, 23 nt, synthetic construct
  source 1..23: mol_type = other RNA
ttgatggtattttatcatccatt

SEQ ID NO: 2161 - RNA, 23 nt, synthetic construct
  source 1..23: mol_type = other RNA
agctgcattttgatggtattttt

SEQ ID NO: 2162 - RNA, 23 nt, synthetic construct
  source 1..23: mol_type = other RNA
agcatggagatttgaaagccctt

SEQ ID NO: 2163 - RNA, 23 nt, synthetic construct
  source 1..23: mol_type = other RNA
aagcatggagatttgaaagcctt

SEQ ID NO: 2164 - RNA, 23 nt, synthetic construct
  source 1..23: mol_type = other RNA
tattgaggcagcatggagatttt

SEQ ID NO: 2165 - RNA, 23 nt, synthetic construct
  source 1..23: mol_type = other RNA
atattgaggcagcatggagattt

SEQ ID NO: 2166 - RNA, 23 nt, synthetic construct
  source 1..23: mol_type = other RNA
agtattgaggcagcatggagatt

SEQ ID NO: 2167 - RNA, 23 nt, synthetic construct
  source 1..23: mol_type = other RNA
agagttcaggtattgaggcagtt

SEQ ID NO: 2168 - RNA, 23 nt, synthetic construct
  source 1..23: mol_type = other RNA
aatttcctggaggtgttccagtt

SEQ ID NO: 2169 - RNA, 23 nt, synthetic construct
  source 1..23: mol_type = other RNA
attgtcttcaaaatcccgaagtt

SEQ ID NO: 2170 - RNA, 23 nt, synthetic construct
  source 1..23: mol_type = other RNA
agagtgcggtcttccttctggtt

SEQ ID NO: 2171 - RNA, 23 nt, synthetic construct
  source 1..23: mol_type = other RNA
ataggagtgcggtcttccttctt

SEQ ID NO: 2172 - RNA, 23 nt, synthetic construct
  source 1..23: mol_type = other RNA
aataggagtgcggtcttcctttt

SEQ ID NO: 2173 - RNA, 23 nt, synthetic construct
  source 1..23: mol_type = other RNA
acataggagtgcggtcttccttt

SEQ ID NO: 2174 - RNA, 23 nt, synthetic construct
  source 1..23: mol_type = other RNA
accataggagtgcggtcttcctt

SEQ ID NO: 2175 - RNA, 23 nt, synthetic construct
  source 1..23: mol_type = other RNA
agccataggagtgcggtcttctt

SEQ ID NO: 2176 - RNA, 23 nt, synthetic construct
  source 1..23: mol_type = other RNA
tcagccataggagtgcggtcttt

SEQ ID NO: 2177 - RNA, 23 nt, synthetic construct
  source 1..23: mol_type = other RNA
tcttcagccataggagtgcggtt

SEQ ID NO: 2178 - RNA, 23 nt, synthetic construct
  source 1..23: mol_type = other RNA
agtttcgcctttatgtgcttatt

SEQ ID NO: 2179 - RNA, 23 nt, synthetic construct
  source 1..23: mol_type = other RNA
aagtttcgcctttatgtgctttt

SEQ ID NO: 2180 - RNA, 23 nt, synthetic construct
  source 1..23: mol_type = other RNA
atcagtttcgcctttatgtgctt

SEQ ID NO: 2181 - RNA, 23 nt, synthetic construct
  source 1..23: mol_type = other RNA
acctcacatggacttggaatctt

SEQ ID NO: 2182 - RNA, 23 nt, synthetic construct
  source 1..23: mol_type = other RNA
accctcacatggacttggaattt

SEQ ID NO: 2183 - RNA, 23 nt, synthetic construct
  source 1..23: mol_type = other RNA
atgcccctcacatggacttggtt

SEQ ID NO: 2184 - RNA, 23 nt, synthetic construct
  source 1..23: mol_type = other RNA
aatgcccctcacatggacttgtt

SEQ ID NO: 2185 - RNA, 23 nt, synthetic construct
  source 1..23: mol_type = other RNA
agccatgcccctcacatggactt

SEQ ID NO: 2186 - RNA, 23 nt, synthetic construct
  source 1..23: mol_type = other RNA
ataaactctcaccgcagctgctt

SEQ ID NO: 2187 - RNA, 23 nt, synthetic construct
  source 1..23: mol_type = other RNA
aagtaaactctcaccgcagcttt

SEQ ID NO: 2188 - RNA, 23 nt, synthetic construct
  source 1..23: mol_type = other RNA
aagagctgcactttctctgggtt

SEQ ID NO: 2189 - RNA, 23 nt, synthetic construct
  source 1..23: mol_type = other RNA
acagaagggctgcatgctttgtt

SEQ ID NO: 2190 - RNA, 23 nt, synthetic construct
  source 1..23: mol_type = other RNA
aaatggtctagaggcagaaggtt

SEQ ID NO: 2191 - RNA, 23 nt, synthetic construct
  source 1..23: mol_type = other RNA
accaaatggtctagaggcagatt

SEQ ID NO: 2192 - RNA, 23 nt, synthetic construct
  source 1..23: mol_type = other RNA
accgatgccaaatggtctagatt

SEQ ID NO: 2193 - RNA, 23 nt, synthetic construct
  source 1..23: mol_type = other RNA
agccgatgccaaatggtctagtt

SEQ ID NO: 2194 - RNA, 23 nt, synthetic construct
  source 1..23: mol_type = other RNA
aagccgatgccaaatggtctatt

SEQ ID NO: 2195 - RNA, 23 nt, synthetic construct
  source 1..23: mol_type = other RNA
agagccgatgccaaatggtcttt

SEQ ID NO: 2196 - RNA, 23 nt, synthetic construct
  source 1..23: mol_type = other RNA
aaaacaggagccgatgccaaatt

SEQ ID NO: 2197 - RNA, 23 nt, synthetic construct
  source 1..23: mol_type = other RNA
atggaaacaggagccgatgcctt

SEQ ID NO: 2198 - RNA, 23 nt, synthetic construct
  source 1..23: mol_type = other RNA
agcaatggaaacaggagccgatt

SEQ ID NO: 2199 - RNA, 23 nt, synthetic construct
  source 1..23: mol_type = other RNA
aaggcaatggaaacaggagcctt

SEQ ID NO: 2200 - RNA, 23 nt, synthetic construct
  source 1..23: mol_type = other RNA
tttccaattacaaaatgcctatt

SEQ ID NO: 2201 - RNA, 23 nt, synthetic construct
  source 1..23: mol_type = other RNA
atttccaattacaaaatgccttt

SEQ ID NO: 2202 - RNA, 23 nt, synthetic construct
  source 1..23: mol_type = other RNA
ttgactttccaattacaaaattt

SEQ ID NO: 2203 - RNA, 23 nt, synthetic construct
  source 1..23: mol_type = other RNA
tcttgactttccaattacaaatt

SEQ ID NO: 2204 - RNA, 23 nt, synthetic construct
  source 1..23: mol_type = other RNA
tgcagtcttgactttccaatttt

SEQ ID NO: 2205 - RNA, 23 nt, synthetic construct
  source 1..23: mol_type = other RNA
atactgcagtcttgactttcctt

SEQ ID NO: 2206 - RNA, 23 nt, synthetic construct
  source 1..23: mol_type = other RNA
tgcacatactgcagtcttgactt

SEQ ID NO: 2207 - RNA, 23 nt, synthetic construct
  source 1..23: mol_type = other RNA
atgcacatactgcagtcttgatt

SEQ ID NO: 2208 - RNA, 23 nt, synthetic construct
  source 1..23: mol_type = other RNA
aagctccactactgtgtgtgttt

SEQ ID NO: 2209 - RNA, 23 nt, synthetic construct
  source 1..23: mol_type = other RNA
agaaagctccactactgtgtgtt

SEQ ID NO: 2210 - RNA, 23 nt, synthetic construct
  source 1..23: mol_type = other RNA
aggaaagctccactactgtgttt

SEQ ID NO: 2211 - RNA, 23 nt, synthetic construct
  source 1..23: mol_type = other RNA
atctgctagtgttaggaaagctt

SEQ ID NO: 2212 - RNA, 23 nt, synthetic construct
  source 1..23: mol_type = other RNA
aattaatctctgctagtgttatt

SEQ ID NO: 2213 - RNA, 23 nt, synthetic construct
  source 1..23: mol_type = other RNA
tgattaatctctgctagtgtttt

SEQ ID NO: 2214 - RNA, 23 nt, synthetic construct
  source 1..23: mol_type = other RNA
atgattaatctctgctagtgttt

SEQ ID NO: 2215 - RNA, 23 nt, synthetic construct
  source 1..23: mol_type = other RNA
atagtgattaatctctgctagtt

SEQ ID NO: 2216 - RNA, 23 nt, synthetic construct
  source 1..23: mol_type = other RNA
ataatgtagtgattaatctcttt

SEQ ID NO: 2217 - RNA, 23 nt, synthetic construct
  source 1..23: mol_type = other RNA
aatgagtgttgtctaatgtagtt

SEQ ID NO: 2218 - RNA, 23 nt, synthetic construct
  source 1..23: mol_type = other RNA
agatgagtgttgtctaatgtatt

SEQ ID NO: 2219 - RNA, 23 nt, synthetic construct
  source 1..23: mol_type = other RNA
atagatgagtgttgtctaatgtt

SEQ ID NO: 2220 - RNA, 23 nt, synthetic construct
  source 1..23: mol_type = other RNA
tctcttgtttctcagttatcctt

SEQ ID NO: 2221 - RNA, 23 nt, synthetic construct
  source 1..23: mol_type = other RNA
agttagacagagaatggtctctt

SEQ ID NO: 2222 - RNA, 23 nt, synthetic construct
  source 1..23: mol_type = other RNA
atttttatcacagttagacagtt

SEQ ID NO: 2223 - RNA, 23 nt, synthetic construct
  source 1..23: mol_type = other RNA
atctatagaataaagtcctgatt

SEQ ID NO: 2224 - RNA, 23 nt, synthetic construct
  source 1..23: mol_type = other RNA
atttgctctatagaataaagttt

SEQ ID NO: 2225 - RNA, 23 nt, synthetic construct
  source 1..23: mol_type = other RNA
aaagtttgctctatagaataatt

SEQ ID NO: 2226 - RNA, 23 nt, synthetic construct
  source 1..23: mol_type = other RNA
acaagtttgctctatagaatatt

SEQ ID NO: 2227 - RNA, 23 nt, synthetic construct
  source 1..23: mol_type = other RNA
aagcaagtttgctctatagaatt

SEQ ID NO: 2228 - RNA, 23 nt, synthetic construct
  source 1..23: mol_type = other RNA
agagagcatggccctccacagtt

SEQ ID NO: 2229 - RNA, 23 nt, synthetic construct
  source 1..23: mol_type = other RNA
ttaactgggtccaaggagagctt

SEQ ID NO: 2230 - RNA, 23 nt, synthetic construct
  source 1..23: mol_type = other RNA
agttaactgggtccaaggagatt

SEQ ID NO: 2231 - RNA, 23 nt, synthetic construct
  source 1..23: mol_type = other RNA
aagttaactgggtccaaggagtt

SEQ ID NO: 2232 - RNA, 23 nt, synthetic construct
  source 1..23: mol_type = other RNA
tgcagttaactgggtccaaggtt

SEQ ID NO: 2233 - RNA, 23 nt, synthetic construct
  source 1..23: mol_type = other RNA
ttgcagttaactgggtccaagtt

SEQ ID NO: 2234 - RNA, 23 nt, synthetic construct
  source 1..23: mol_type = other RNA
agtttgcagttaactgggtcctt

SEQ ID NO: 2235 - RNA, 23 nt, synthetic construct
  source 1..23: mol_type = other RNA
acgtttgcagttaactgggtctt

SEQ ID NO: 2236 - RNA, 23 nt, synthetic construct
  source 1..23: mol_type = other RNA
aacgtttgcagttaactgggttt

SEQ ID NO: 2237 - RNA, 23 nt, synthetic construct
  source 1..23: mol_type = other RNA
acacgtttgcagttaactgggtt

SEQ ID NO: 2238 - RNA, 23 nt, synthetic construct
  source 1..23: mol_type = other RNA
tgcacgtttgcagttaactggtt

SEQ ID NO: 2239 - RNA, 23 nt, synthetic construct
  source 1..23: mol_type = other RNA
atgcacgtttgcagttaactgtt

SEQ ID NO: 2240 - RNA, 23 nt, synthetic construct
  source 1..23: mol_type = other RNA
acaatgcacgtttgcagttaatt

SEQ ID NO: 2241 - RNA, 23 nt, synthetic construct
  source 1..23: mol_type = other RNA
agctccaatgcacgtttgcagtt

SEQ ID NO: 2242 - RNA, 23 nt, synthetic construct
  source 1..23: mol_type = other RNA
aggctccaatgcacgtttgcatt

SEQ ID NO: 2243 - RNA, 23 nt, synthetic construct
  source 1..23: mol_type = other RNA
aatagggctccaatgcacgtttt

SEQ ID NO: 2244 - RNA, 23 nt, synthetic construct
  source 1..23: mol_type = other RNA
aaatagggctccaatgcacgttt

SEQ ID NO: 2245 - RNA, 23 nt, synthetic construct
  source 1..23: mol_type = other RNA
acaaatagggctccaatgcactt

SEQ ID NO: 2246 - RNA, 23 nt, synthetic construct
  source 1..23: mol_type = other RNA
agcaaatagggctccaatgcatt

SEQ ID NO: 2247 - RNA, 23 nt, synthetic construct
  source 1..23: mol_type = other RNA
acggcagcaaatagggctccatt

SEQ ID NO: 2248 - RNA, 23 nt, synthetic construct
  source 1..23: mol_type = other RNA
agcggcagcaaatagggctcctt

SEQ ID NO: 2249 - RNA, 23 nt, synthetic construct
  source 1..23: mol_type = other RNA
aagcggcagcaaatagggctctt

SEQ ID NO: 2250 - RNA, 23 nt, synthetic construct
  source 1..23: mol_type = other RNA
acagcggcagcaaatagggcttt

SEQ ID NO: 2251 - RNA, 23 nt, synthetic construct
  source 1..23: mol_type = other RNA
aggtcactagaatggcagcggtt

SEQ ID NO: 2252 - RNA, 23 nt, synthetic construct
  source 1..23: mol_type = other RNA
agaaaggtcactagaatggcatt

SEQ ID NO: 2253 - RNA, 23 nt, synthetic construct
  source 1..23: mol_type = other RNA
tggaaaggtcactagaatggctt

SEQ ID NO: 2254 - RNA, 23 nt, synthetic construct
  source 1..23: mol_type = other RNA
actctgtggaaaggtcactagtt

SEQ ID NO: 2255 - RNA, 23 nt, synthetic construct
  source 1..23: mol_type = other RNA
acgtgaggaaggcgcagctcttt

SEQ ID NO: 2256 - RNA, 23 nt, synthetic construct
  source 1..23: mol_type = other RNA
tcacacacgtgaggaaggcgctt

SEQ ID NO: 2257 - RNA, 23 nt, synthetic construct
  source 1..23: mol_type = other RNA
aaacctttcacacacgtgaggtt

SEQ ID NO: 2258 - RNA, 23 nt, synthetic construct
  source 1..23: mol_type = other RNA
aaaacctttcacacacgtgagtt

SEQ ID NO: 2259 - RNA, 23 nt, synthetic construct
  source 1..23: mol_type = other RNA
tccatctacctgagggctgaatt

SEQ ID NO: 2260 - RNA, 23 nt, synthetic construct
  source 1..23: mol_type = other RNA
ttccatctacctgagggctgatt

SEQ ID NO: 2261 - RNA, 23 nt, synthetic construct
  source 1..23: mol_type = other RNA
acttccatctacctgagggcttt

SEQ ID NO: 2262 - RNA, 23 nt, synthetic construct
  source 1..23: mol_type = other RNA
agtcctgaagaaacatcctgatt

SEQ ID NO: 2263 - RNA, 23 nt, synthetic construct
  source 1..23: mol_type = other RNA
aattccttgtcagctgaggaatt

SEQ ID NO: 2264 - RNA, 23 nt, synthetic construct
  source 1..23: mol_type = other RNA
aaccaaaattccttgtcagcttt

SEQ ID NO: 2265 - RNA, 23 nt, synthetic construct
  source 1..23: mol_type = other RNA
actaggcagggaccaaaattctt

SEQ ID NO: 2266 - RNA, 23 nt, synthetic construct
  source 1..23: mol_type = other RNA
tcctaggcagggaccaaaatttt

SEQ ID NO: 2267 - RNA, 23 nt, synthetic construct
  source 1..23: mol_type = other RNA
aggtcctaggcagggaccaaatt

SEQ ID NO: 2268 - RNA, 23 nt, synthetic construct
  source 1..23: mol_type = other RNA
agatgacccggtcctaggcagtt

SEQ ID NO: 2269 - RNA, 23 nt, synthetic construct
  source 1..23: mol_type = other RNA
agctgcttaccatctctctgttt

SEQ ID NO: 2270 - RNA, 23 nt, synthetic construct
  source 1..23: mol_type = other RNA
tacagctgcttaccatctctctt

SEQ ID NO: 2271 - RNA, 23 nt, synthetic construct
  source 1..23: mol_type = other RNA
atacagctgcttaccatctcttt

SEQ ID NO: 2272 - RNA, 23 nt, synthetic construct
  source 1..23: mol_type = other RNA
aatacagctgcttaccatctctt

SEQ ID NO: 2273 - RNA, 23 nt, synthetic construct
  source 1..23: mol_type = other RNA
agcattcatacagctgcttactt

SEQ ID NO: 2274 - RNA, 23 nt, synthetic construct
  source 1..23: mol_type = other RNA
atcagcattcatacagctgcttt

SEQ ID NO: 2275 - RNA, 23 nt, synthetic construct
  source 1..23: mol_type = other RNA
acatgacctggttttaaaatctt

SEQ ID NO: 2276 - RNA, 23 nt, synthetic construct
  source 1..23: mol_type = other RNA
tcccatgacctggttttaaaatt

SEQ ID NO: 2277 - RNA, 23 nt, synthetic construct
  source 1..23: mol_type = other RNA
ataagtgcagtcagtgttcagtt

SEQ ID NO: 2278 - RNA, 23 nt, synthetic construct
  source 1..23: mol_type = other RNA
agtaagtgcagtcagtgttcatt

SEQ ID NO: 2279 - RNA, 23 nt, synthetic construct
  source 1..23: mol_type = other RNA
ataaaatcagactggtaagtgtt

SEQ ID NO: 2280 - RNA, 23 nt, synthetic construct
  source 1..23: mol_type = other RNA
tgacgataaaatcagactggttt

SEQ ID NO: 2281 - RNA, 23 nt, synthetic construct
  source 1..23: mol_type = other RNA
ttgacgataaaatcagactggtt

SEQ ID NO: 2282 - RNA, 23 nt, synthetic construct
  source 1..23: mol_type = other RNA
atgtttgacgataaaatcagatt

SEQ ID NO: 2283 - RNA, 23 nt, synthetic construct
  source 1..23: mol_type = other RNA
agtgtttgacgataaaatcagtt

SEQ ID NO: 2284 - RNA, 23 nt, synthetic construct
  source 1..23: mol_type = other RNA
tggtgtttgacgataaaatcatt

SEQ ID NO: 2285 - RNA, 23 nt, synthetic construct
  source 1..23: mol_type = other RNA
ttggtgtttgacgataaaatctt

SEQ ID NO: 2286 - RNA, 23 nt, synthetic construct
  source 1..23: mol_type = other RNA
attggtgtttgacgataaaattt

SEQ ID NO: 2287 - RNA, 23 nt, synthetic construct
  source 1..23: mol_type = other RNA
tggcttggtgtttgacgataatt

SEQ ID NO: 2288 - RNA, 23 nt, synthetic construct
  source 1..23: mol_type = other RNA
atggcttggtgtttgacgatatt

SEQ ID NO: 2289 - RNA, 23 nt, synthetic construct
  source 1..23: mol_type = other RNA
aaacagattgccatgagcatgtt

SEQ ID NO: 2290 - RNA, 23 nt, synthetic construct
  source 1..23: mol_type = other RNA
accccaaacagattgccatgatt

SEQ ID NO: 2291 - RNA, 23 nt, synthetic construct
  source 1..23: mol_type = other RNA
tggctagtgccacaacaaaactt

SEQ ID NO: 2292 - RNA, 23 nt, synthetic construct
  source 1..23: mol_type = other RNA
ttggctagtgccacaacaaaatt

SEQ ID NO: 2293 - RNA, 23 nt, synthetic construct
  source 1..23: mol_type = other RNA
tttggctagtgccacaacaaatt

SEQ ID NO: 2294 - RNA, 23 nt, synthetic construct
  source 1..23: mol_type = other RNA
atttggctagtgccacaacaatt

SEQ ID NO: 2295 - RNA, 23 nt, synthetic construct
  source 1..23: mol_type = other RNA
atgtttggctagtgccacaactt

SEQ ID NO: 2296 - RNA, 23 nt, synthetic construct
  source 1..23: mol_type = other RNA
tatgtttggctagtgccacaatt

SEQ ID NO: 2297 - RNA, 23 nt, synthetic construct
  source 1..23: mol_type = other RNA
ttatgtttggctagtgccacatt

SEQ ID NO: 2298 - RNA, 23 nt, synthetic construct
  source 1..23: mol_type = other RNA
tttatgtttggctagtgccactt

SEQ ID NO: 2299 - RNA, 23 nt, synthetic construct
  source 1..23: mol_type = other RNA
atttatgtttggctagtgccatt

SEQ ID NO: 2300 - RNA, 23 nt, synthetic construct
  source 1..23: mol_type = other RNA
actttatgtttggctagtgcctt

SEQ ID NO: 2301 - RNA, 23 nt, synthetic construct
  source 1..23: mol_type = other RNA
acctttatgtttggctagtgctt

SEQ ID NO: 2302 - RNA, 23 nt, synthetic construct
  source 1..23: mol_type = other RNA
taagcccctttatgtttggcttt

SEQ ID NO: 2303 - RNA, 23 nt, synthetic construct
  source 1..23: mol_type = other RNA
ttaagcccctttatgtttggctt

SEQ ID NO: 2304 - RNA, 23 nt, synthetic construct
  source 1..23: mol_type = other RNA
attaagcccctttatgtttggtt

SEQ ID NO: 2305 - RNA, 23 nt, synthetic construct
  source 1..23: mol_type = other RNA
acttaagcccctttatgtttgtt

SEQ ID NO: 2306 - RNA, 23 nt, synthetic construct
  source 1..23: mol_type = other RNA
aacttaagcccctttatgttttt

SEQ ID NO: 2307 - RNA, 23 nt, synthetic construct
  source 1..23: mol_type = other RNA
tgacttaagcccctttatgtttt

SEQ ID NO: 2308 - RNA, 23 nt, synthetic construct
  source 1..23: mol_type = other RNA
atgacttaagcccctttatgttt

SEQ ID NO: 2309 - RNA, 23 nt, synthetic construct
  source 1..23: mol_type = other RNA
agctgacttaagcccctttattt

SEQ ID NO: 2310 - RNA, 23 nt, synthetic construct
  source 1..23: mol_type = other RNA
aggctgacttaagcccctttatt

SEQ ID NO: 2311 - RNA, 23 nt, synthetic construct
  source 1..23: mol_type = other RNA
tgcaggctgacttaagccccttt

SEQ ID NO: 2312 - RNA, 23 nt, synthetic construct
  source 1..23: mol_type = other RNA
actctgtatgcaggctgactttt

SEQ ID NO: 2313 - RNA, 23 nt, synthetic construct
  source 1..23: mol_type = other RNA
tcctctgtatgcaggctgacttt

SEQ ID NO: 2314 - RNA, 23 nt, synthetic construct
  source 1..23: mol_type = other RNA
acgatcctctgtatgcaggcttt

SEQ ID NO: 2315 - RNA, 23 nt, synthetic construct
  source 1..23: mol_type = other RNA
accgatcctctgtatgcaggctt

SEQ ID NO: 2316 - RNA, 23 nt, synthetic construct
  source 1..23: mol_type = other RNA
acccgatcctctgtatgcaggtt

SEQ ID NO: 2317 - RNA, 23 nt, synthetic construct
  source 1..23: mol_type = other RNA
attctctccccgatcctctgttt

SEQ ID NO: 2318 - RNA, 23 nt, synthetic construct
  source 1..23: mol_type = other RNA
attaaactctggtaagtactctt

SEQ ID NO: 2319 - RNA, 23 nt, synthetic construct
  source 1..23: mol_type = other RNA
agtttggggattttagtgcagtt

SEQ ID NO: 2320 - RNA, 23 nt, synthetic construct
  source 1..23: mol_type = other RNA
aagtttggggattttagtgcatt

SEQ ID NO: 2321 - RNA, 23 nt, synthetic construct
  source 1..23: mol_type = other RNA
atcagtttggggattttagtgtt

SEQ ID NO: 2322 - RNA, 23 nt, synthetic construct
  source 1..23: mol_type = other RNA
ttacctgtcagtttggggatttt

SEQ ID NO: 2323 - RNA, 23 nt, synthetic construct
  source 1..23: mol_type = other RNA
tacatttacctgtcagtttggtt

SEQ ID NO: 2324 - RNA, 23 nt, synthetic construct
  source 1..23: mol_type = other RNA
atacatttacctgtcagtttgtt

SEQ ID NO: 2325 - RNA, 23 nt, synthetic construct
  source 1..23: mol_type = other RNA
actacatttacctgtcagttttt

SEQ ID NO: 2326 - RNA, 23 nt, synthetic construct
  source 1..23: mol_type = other RNA
aggctacatttacctgtcagttt

SEQ ID NO: 2327 - RNA, 23 nt, synthetic construct
  source 1..23: mol_type = other RNA
agaaaatagtgtgatttagattt

SEQ ID NO: 2328 - RNA, 23 nt, synthetic construct
  source 1..23: mol_type = other RNA
atcgaaaatagtgtgatttagtt

SEQ ID NO: 2329 - RNA, 23 nt, synthetic construct
  source 1..23: mol_type = other RNA
tctcgaaaatagtgtgatttatt

SEQ ID NO: 2330 - RNA, 23 nt, synthetic construct
  source 1..23: mol_type = other RNA
aatctcgaaaatagtgtgatttt

SEQ ID NO: 2331 - RNA, 23 nt, synthetic construct
  source 1..23: mol_type = other RNA
atgatctcgaaaatagtgtgatt

SEQ ID NO: 2332 - RNA, 23 nt, synthetic construct
  source 1..23: mol_type = other RNA
aatgatctcgaaaatagtgtgtt

SEQ ID NO: 2333 - RNA, 23 nt, synthetic construct
  source 1..23: mol_type = other RNA
acatgatctcgaaaatagtgttt

SEQ ID NO: 2334 - RNA, 23 nt, synthetic construct
  source 1..23: mol_type = other RNA
atacatgatctcgaaaatagttt

SEQ ID NO: 2335 - RNA, 23 nt, synthetic construct
  source 1..23: mol_type = other RNA
tatacatgatctcgaaaatagtt

SEQ ID NO: 2336 - RNA, 23 nt, synthetic construct
  source 1..23: mol_type = other RNA
tttatacatgatctcgaaaattt

SEQ ID NO: 2337 - RNA, 23 nt, synthetic construct
  source 1..23: mol_type = other RNA
atttttatacatgatctcgaatt

SEQ ID NO: 2338 - RNA, 23 nt, synthetic construct
  source 1..23: mol_type = other RNA
acacagcatgacttctttttttt

SEQ ID NO: 2339 - RNA, 23 nt, synthetic construct
  source 1..23: mol_type = other RNA
attataattggccacacagcatt

SEQ ID NO: 2340 - RNA, 23 nt, synthetic construct
  source 1..23: mol_type = other RNA
tacatttcctggtccctccaatt

SEQ ID NO: 2341 - RNA, 23 nt, synthetic construct
  source 1..23: mol_type = other RNA
tggtgtcttacatttcctggttt

SEQ ID NO: 2342 - RNA, 23 nt, synthetic construct
  source 1..23: mol_type = other RNA
ttggtgtcttacatttcctggtt

SEQ ID NO: 2343 - RNA, 23 nt, synthetic construct
  source 1..23: mol_type = other RNA
atgaggtgacatcaggcacactt

SEQ ID NO: 2344 - RNA, 23 nt, synthetic construct
  source 1..23: mol_type = other RNA
aatgaggtgacatcaggcacatt

SEQ ID NO: 2345 - RNA, 23 nt, synthetic construct
  source 1..23: mol_type = other RNA
tcatgaggtgacatcaggcactt

SEQ ID NO: 2346 - RNA, 23 nt, synthetic construct
  source 1..23: mol_type = other RNA
aatcatgaggtgacatcaggctt

SEQ ID NO: 2347 - RNA, 23 nt, synthetic construct
  source 1..23: mol_type = other RNA
attggcgcaggagttaaaaaatt

SEQ ID NO: 2348 - RNA, 23 nt, synthetic construct
  source 1..23: mol_type = other RNA
tgtccttggcgcaggagttaatt

SEQ ID NO: 2349 - RNA, 23 nt, synthetic construct
  source 1..23: mol_type = other RNA
actgtccttggcgcaggagtttt

SEQ ID NO: 2350 - RNA, 23 nt, synthetic construct
  source 1..23: mol_type = other RNA
aactgtccttggcgcaggagttt

SEQ ID NO: 2351 - RNA, 23 nt, synthetic construct
  source 1..23: mol_type = other RNA
agcaaagcacaaaggtggacatt

SEQ ID NO: 2352 - RNA, 23 nt, synthetic construct
  source 1..23: mol_type = other RNA
atcgcaaagcacaaaggtggatt

SEQ ID NO: 2353 - RNA, 23 nt, synthetic construct
  source 1..23: mol_type = other RNA
acctcgcaaagcacaaaggtgtt

SEQ ID NO: 2354 - RNA, 23 nt, synthetic construct
  source 1..23: mol_type = other RNA
aggcctcgcaaagcacaaaggtt

SEQ ID NO: 2355 - RNA, 23 nt, synthetic construct
  source 1..23: mol_type = other RNA
aggcctcgcaaagcacaaaggtt

SEQ ID NO: 2356 - RNA, 23 nt, synthetic construct
  source 1..23: mol_type = other RNA
agcgagcagatgcctgggctctt

SEQ ID NO: 2357 - RNA, 23 nt, synthetic construct
  source 1..23: mol_type = other RNA
acaggcgagcagatgcctgggtt

SEQ ID NO: 2358 - RNA, 23 nt, synthetic construct
  source 1..23: mol_type = other RNA
tggcaggcgagcagatgcctgtt

SEQ ID NO: 2359 - RNA, 23 nt, synthetic construct
  source 1..23: mol_type = other RNA
acgtggcaggcgagcagatgctt

SEQ ID NO: 2360 - RNA, 23 nt, synthetic construct
  source 1..23: mol_type = other RNA
attctctggtcagccgtggcatt

SEQ ID NO: 2361 - RNA, 23 nt, synthetic construct
  source 1..23: mol_type = other RNA
acgtcgtctaaggcagagctctt

SEQ ID NO: 2362 - RNA, 23 nt, synthetic construct
  source 1..23: mol_type = other RNA
aacgtcgtctaaggcagagcttt

SEQ ID NO: 2363 - RNA, 23 nt, synthetic construct
  source 1..23: mol_type = other RNA
acacgtcgtctaaggcagagctt

SEQ ID NO: 2364 - RNA, 23 nt, synthetic construct
  source 1..23: mol_type = other RNA
aacacgtcgtctaaggcagagtt

SEQ ID NO: 2365 - RNA, 23 nt, synthetic construct
  source 1..23: mol_type = other RNA
taacacgtcgtctaaggcagatt

SEQ ID NO: 2366 - RNA, 23 nt, synthetic construct
  source 1..23: mol_type = other RNA
ataacacgtcgtctaaggcagtt

SEQ ID NO: 2367 - RNA, 23 nt, synthetic construct
  source 1..23: mol_type = other RNA
atgtaacacgtcgtctaaggctt

SEQ ID NO: 2368 - RNA, 23 nt, synthetic construct
  source 1..23: mol_type = other RNA
actgtaacacgtcgtctaaggtt

SEQ ID NO: 2369 - RNA, 23 nt, synthetic construct
  source 1..23: mol_type = other RNA
tactgtaacacgtcgtctaagtt

SEQ ID NO: 2370 - RNA, 23 nt, synthetic construct
  source 1..23: mol_type = other RNA
aatactgtaacacgtcgtctatt

SEQ ID NO: 2371 - RNA, 23 nt, synthetic construct
  source 1..23: mol_type = other RNA
attcatactgtaacacgtcgttt

SEQ ID NO: 2372 - RNA, 23 nt, synthetic construct
  source 1..23: mol_type = other RNA
acgagggtgcctctgctgtgttt

SEQ ID NO: 2373 - RNA, 23 nt, synthetic construct
  source 1..23: mol_type = other RNA
tacgagggtgcctctgctgtgtt

SEQ ID NO: 2374 - RNA, 23 nt, synthetic construct
  source 1..23: mol_type = other RNA
atacgagggtgcctctgctgttt

SEQ ID NO: 2375 - RNA, 23 nt, synthetic construct
  source 1..23: mol_type = other RNA
aatacgagggtgcctctgctgtt

SEQ ID NO: 2376 - RNA, 23 nt, synthetic construct
  source 1..23: mol_type = other RNA
acatacgagggtgcctctgcttt

SEQ ID NO: 2377 - RNA, 23 nt, synthetic construct
  source 1..23: mol_type = other RNA
aacatacgagggtgcctctgctt

SEQ ID NO: 2378 - RNA, 23 nt, synthetic construct
  source 1..23: mol_type = other RNA
aaacatacgagggtgcctctgtt

SEQ ID NO: 2379 - RNA, 23 nt, synthetic construct
  source 1..23: mol_type = other RNA
aaaacatacgagggtgcctcttt

SEQ ID NO: 2380 - RNA, 23 nt, synthetic construct
  source 1..23: mol_type = other RNA
aaaaacatacgagggtgcctctt

SEQ ID NO: 2381 - RNA, 23 nt, synthetic construct
  source 1..23: mol_type = other RNA
ttcaaaacatacgagggtgcctt

SEQ ID NO: 2382 - RNA, 23 nt, synthetic construct
  source 1..23: mol_type = other RNA
aactttcaaaacatacgagggtt

SEQ ID NO: 2383 - RNA, 23 nt, synthetic construct
  source 1..23: mol_type = other RNA
agggtcagtatagttttacattt

SEQ ID NO: 2384 - RNA, 23 nt, synthetic construct
  source 1..23: mol_type = other RNA
acgggtcagtatagttttacatt

SEQ ID NO: 2385 - RNA, 23 nt, synthetic construct
  source 1..23: mol_type = other RNA
aacgggtcagtatagttttactt

SEQ ID NO: 2386 - RNA, 23 nt, synthetic construct
  source 1..23: mol_type = other RNA
aaacgggtcagtatagttttatt

SEQ ID NO: 2387 - RNA, 23 nt, synthetic construct
  source 1..23: mol_type = other RNA
atgaaaacgggtcagtatagttt

SEQ ID NO: 2388 - RNA, 23 nt, synthetic construct
  source 1..23: mol_type = other RNA
aaactgaaaacgggtcagtattt

SEQ ID NO: 2389 - RNA, 23 nt, synthetic construct
  source 1..23: mol_type = other RNA
aacgaccctttaaaactgaaatt

SEQ ID NO: 2390 - RNA, 23 nt, synthetic construct
  source 1..23: mol_type = other RNA
tcacgaccctttaaaactgaatt

SEQ ID NO: 2391 - RNA, 23 nt, synthetic construct
  source 1..23: mol_type = other RNA
atcacgaccctttaaaactgatt

SEQ ID NO: 2392 - RNA, 23 nt, synthetic construct
  source 1..23: mol_type = other RNA
tctcacgaccctttaaaactgtt

SEQ ID NO: 2393 - RNA, 23 nt, synthetic construct
  source 1..23: mol_type = other RNA
tttctcacgaccctttaaaactt

SEQ ID NO: 2394 - RNA, 23 nt, synthetic construct
  source 1..23: mol_type = other RNA
agtttctcacgaccctttaaatt

SEQ ID NO: 2395 - RNA, 23 nt, synthetic construct
  source 1..23: mol_type = other RNA
acagtttctcacgaccctttatt

SEQ ID NO: 2396 - RNA, 23 nt, synthetic construct
  source 1..23: mol_type = other RNA
accagtttctcacgacccttttt

SEQ ID NO: 2397 - RNA, 23 nt, synthetic construct
  source 1..23: mol_type = other RNA
aattggaccagccagtttctctt

SEQ ID NO: 2398 - RNA, 23 nt, synthetic construct
  source 1..23: mol_type = other RNA
actgtaaatcccattggaccatt

SEQ ID NO: 2399 - RNA, 23 nt, synthetic construct
  source 1..23: mol_type = other RNA
tgttgctgtaaatcccattggtt

SEQ ID NO: 2400 - RNA, 23 nt, synthetic construct
  source 1..23: mol_type = other RNA
acgattaagagcaaacttaaatt

SEQ ID NO: 2401 - RNA, 23 nt, synthetic construct
  source 1..23: mol_type = other RNA
tacgattaagagcaaacttaatt

SEQ ID NO: 2402 - RNA, 23 nt, synthetic construct
  source 1..23: mol_type = other RNA
acatacgattaagagcaaacttt

SEQ ID NO: 2403 - RNA, 23 nt, synthetic construct
  source 1..23: mol_type = other RNA
tccatacgattaagagcaaactt

SEQ ID NO: 2404 - RNA, 23 nt, synthetic construct
  source 1..23: mol_type = other RNA
ttccatacgattaagagcaaatt

SEQ ID NO: 2405 - RNA, 23 nt, synthetic construct
  source 1..23: mol_type = other RNA
acttccatacgattaagagcatt

SEQ ID NO: 2406 - RNA, 23 nt, synthetic construct
  source 1..23: mol_type = other RNA
tcaagcttccatacgattaagtt

SEQ ID NO: 2407 - RNA, 23 nt, synthetic construct
  source 1..23: mol_type = other RNA
atcaagcttccatacgattaatt

SEQ ID NO: 2408 - RNA, 23 nt, synthetic construct
  source 1..23: mol_type = other RNA
aaacacatagctcaagcttcctt

SEQ ID NO: 2409 - RNA, 23 nt, synthetic construct
  source 1..23: mol_type = other RNA
acaacacatagctcaagcttctt

SEQ ID NO: 2410 - RNA, 23 nt, synthetic construct
  source 1..23: mol_type = other RNA
ttccaacacatagctcaagcttt

SEQ ID NO: 2411 - RNA, 23 nt, synthetic construct
  source 1..23: mol_type = other RNA
attccaacacatagctcaagctt

SEQ ID NO: 2412 - RNA, 23 nt, synthetic construct
  source 1..23: mol_type = other RNA
acttccaacacatagctcaagtt

SEQ ID NO: 2413 - RNA, 23 nt, synthetic construct
  source 1..23: mol_type = other RNA
aacttccaacacatagctcaatt

SEQ ID NO: 2414 - RNA, 23 nt, synthetic construct
  source 1..23: mol_type = other RNA
acacttccaacacatagctcatt

SEQ ID NO: 2415 - RNA, 23 nt, synthetic construct
  source 1..23: mol_type = other RNA
agcacttccaacacatagctctt

SEQ ID NO: 2416 - RNA, 23 nt, synthetic construct
  source 1..23: mol_type = other RNA
aaaccagggcacttccaacactt

SEQ ID NO: 2417 - RNA, 23 nt, synthetic construct
  source 1..23: mol_type = other RNA
aattaaaaccagggcacttcctt

SEQ ID NO: 2418 - RNA, 23 nt, synthetic construct
  source 1..23: mol_type = other RNA
ttgtgtatggattaaaaccagtt

SEQ ID NO: 2419 - RNA, 23 nt, synthetic construct
  source 1..23: mol_type = other RNA
acgtctttgtgtatggattaatt

SEQ ID NO: 2420 - RNA, 23 nt, synthetic construct
  source 1..23: mol_type = other RNA
accgtctttgtgtatggattatt

SEQ ID NO: 2421 - RNA, 23 nt, synthetic construct
  source 1..23: mol_type = other RNA
taccgtctttgtgtatggatttt

SEQ ID NO: 2422 - RNA, 23 nt, synthetic construct
  source 1..23: mol_type = other RNA
ataccgtctttgtgtatggattt

SEQ ID NO: 2423 - RNA, 23 nt, synthetic construct
  source 1..23: mol_type = other RNA
tgtaccgtctttgtgtatggatt

SEQ ID NO: 2424 - RNA, 23 nt, synthetic construct
  source 1..23: mol_type = other RNA
tatgtaccgtctttgtgtatgtt

SEQ ID NO: 2425 - RNA, 23 nt, synthetic construct
  source 1..23: mol_type = other RNA
attatgtaccgtctttgtgtatt

SEQ ID NO: 2426 - RNA, 23 nt, synthetic construct
  source 1..23: mol_type = other RNA
aattatgtaccgtctttgtgttt

SEQ ID NO: 2427 - RNA, 23 nt, synthetic construct
  source 1..23: mol_type = other RNA
agattatgtaccgtctttgtgtt

SEQ ID NO: 2428 - RNA, 23 nt, synthetic construct
  source 1..23: mol_type = other RNA
aggattatgtaccgtctttgttt

SEQ ID NO: 2429 - RNA, 23 nt, synthetic construct
  source 1..23: mol_type = other RNA
taggattatgtaccgtctttgtt

SEQ ID NO: 2430 - RNA, 23 nt, synthetic construct
  source 1..23: mol_type = other RNA
ataggattatgtaccgtcttttt

SEQ ID NO: 2431 - RNA, 23 nt, synthetic construct
  source 1..23: mol_type = other RNA
tgtaggattatgtaccgtctttt

SEQ ID NO: 2432 - RNA, 23 nt, synthetic construct
  source 1..23: mol_type = other RNA
taaacctgtaggattatgtactt

SEQ ID NO: 2433 - RNA, 23 nt, synthetic construct
  source 1..23: mol_type = other RNA
atttaaacctgtaggattatgtt

SEQ ID NO: 2434 - RNA, 23 nt, synthetic construct
  source 1..23: mol_type = other RNA
atacatttaaacctgtaggattt

SEQ ID NO: 2435 - RNA, 23 nt, synthetic construct
  source 1..23: mol_type = other RNA
agagcaaagaattccaaactatt

SEQ ID NO: 2436 - RNA, 23 nt, synthetic construct
  source 1..23: mol_type = other RNA
tagagcaaagaattccaaacttt

SEQ ID NO: 2437 - RNA, 23 nt, synthetic construct
  source 1..23: mol_type = other RNA
agtagagcaaagaattccaaatt

SEQ ID NO: 2438 - RNA, 23 nt, synthetic construct
  source 1..23: mol_type = other RNA
acaatgtaaacagtagagcaatt

SEQ ID NO: 2439 - RNA, 23 nt, synthetic construct
  source 1..23: mol_type = other RNA
atctgcaatgtaaacagtagatt

SEQ ID NO: 2440 - RNA, 23 nt, synthetic construct
  source 1..23: mol_type = other RNA
aaatctgcaatgtaaacagtatt

SEQ ID NO: 2441 - RNA, 23 nt, synthetic construct
  source 1..23: mol_type = other RNA
acaatctgcaatgtaaacagttt

SEQ ID NO: 2442 - RNA, 23 nt, synthetic construct
  source 1..23: mol_type = other RNA
tatagcaatctgcaatgtaaatt

SEQ ID NO: 2443 - RNA, 23 nt, synthetic construct
  source 1..23: mol_type = other RNA
ttatagcaatctgcaatgtaatt

SEQ ID NO: 2444 - RNA, 23 nt, synthetic construct
  source 1..23: mol_type = other RNA
attatagcaatctgcaatgtatt

SEQ ID NO: 2445 - RNA, 23 nt, synthetic construct
  source 1..23: mol_type = other RNA
actccttgaaattatagcaattt

SEQ ID NO: 2446 - RNA, 23 nt, synthetic construct
  source 1..23: mol_type = other RNA
aactccttgaaattatagcaatt

SEQ ID NO: 2447 - RNA, 23 nt, synthetic construct
  source 1..23: mol_type = other RNA
aacatcctaaagtgcatcatttt

SEQ ID NO: 2448 - RNA, 23 nt, synthetic construct
  source 1..23: mol_type = other RNA
aaacatcctaaagtgcatcattt

SEQ ID NO: 2449 - RNA, 23 nt, synthetic construct
  source 1..23: mol_type = other RNA
agtcatgtgaatgattcatgttt

SEQ ID NO: 2450 - RNA, 23 nt, synthetic construct
  source 1..23: mol_type = other RNA
tggtcatgtgaatgattcatgtt

SEQ ID NO: 2451 - RNA, 23 nt, synthetic construct
  source 1..23: mol_type = other RNA
agacagactagacatgtattttt

SEQ ID NO: 2452 - RNA, 23 nt, synthetic construct
  source 1..23: mol_type = other RNA
attaaaggacagactagacattt

SEQ ID NO: 2453 - RNA, 23 nt, synthetic construct
  source 1..23: mol_type = other RNA
tattaaaggacagactagacatt

SEQ ID NO: 2454 - RNA, 23 nt, synthetic construct
  source 1..23: mol_type = other RNA
actattaaaggacagactagatt

SEQ ID NO: 2455 - RNA, 23 nt, synthetic construct
  source 1..23: mol_type = other RNA
agctattaaaggacagactagtt

SEQ ID NO: 2456 - RNA, 23 nt, synthetic construct
  source 1..23: mol_type = other RNA
aagctattaaaggacagactatt

SEQ ID NO: 2457 - RNA, 23 nt, synthetic construct
  source 1..23: mol_type = other RNA
aagagctattaaaggacagactt

SEQ ID NO: 2458 - RNA, 23 nt, synthetic construct
  source 1..23: mol_type = other RNA
ataactggtaatgatctgatttt

SEQ ID NO: 2459 - RNA, 23 nt, synthetic construct
  source 1..23: mol_type = other RNA
agctaactggtaatgatctgatt

SEQ ID NO: 2460 - RNA, 23 nt, synthetic construct
  source 1..23: mol_type = other RNA
aagctaactggtaatgatctgtt

SEQ ID NO: 2461 - RNA, 23 nt, synthetic construct
  source 1..23: mol_type = other RNA
aaagctaactggtaatgatcttt

SEQ ID NO: 2462 - RNA, 23 nt, synthetic construct
  source 1..23: mol_type = other RNA
ttaaaagctaactggtaatgatt

SEQ ID NO: 2463 - RNA, 23 nt, synthetic construct
  source 1..23: mol_type = other RNA
tttaaaagctaactggtaatgtt

SEQ ID NO: 2464 - RNA, 23 nt, synthetic construct
  source 1..23: mol_type = other RNA
atgctttaaaagctaactggttt

SEQ ID NO: 2465 - RNA, 23 nt, synthetic construct
  source 1..23: mol_type = other RNA
tagtcttaaacaaatgtgctttt

SEQ ID NO: 2466 - RNA, 23 nt, synthetic construct
  source 1..23: mol_type = other RNA
aatagtcttaaacaaatgtgctt

SEQ ID NO: 2467 - RNA, 23 nt, synthetic construct
  source 1..23: mol_type = other RNA
agtatttttccaaaaacatagtt

SEQ ID NO: 2468 - RNA, 23 nt, synthetic construct
  source 1..23: mol_type = other RNA
atagcgtatttttccaaaaactt

SEQ ID NO: 2469 - RNA, 23 nt, synthetic construct
  source 1..23: mol_type = other RNA
ttctgtagcgtatttttccaatt

SEQ ID NO: 2470 - RNA, 23 nt, synthetic construct
  source 1..23: mol_type = other RNA
attagtagcatctcatttatttt

SEQ ID NO: 2471 - RNA, 23 nt, synthetic construct
  source 1..23: mol_type = other RNA
aaaacaattagtagcatctcatt

SEQ ID NO: 2472 - RNA, 23 nt, synthetic construct
  source 1..23: mol_type = other RNA
acagaaacaacagattccaaatt

SEQ ID NO: 2473 - RNA, 23 nt, synthetic construct
  source 1..23: mol_type = other RNA
attaatttacctttggcagaatt

SEQ ID NO: 2474 - RNA, 23 nt, synthetic construct
  source 1..23: mol_type = other RNA
agttaatttacctttggcagatt

SEQ ID NO: 2475 - RNA, 23 nt, synthetic construct
  source 1..23: mol_type = other RNA
atggggattcctgaataaatctt

SEQ ID NO: 2476 - RNA, 23 nt, synthetic construct
  source 1..23: mol_type = other RNA
ttcaaatggggattcctgaattt

SEQ ID NO: 2477 - RNA, 23 nt, synthetic construct
  source 1..23: mol_type = other RNA
acaaattcaaatggggattcctt

SEQ ID NO: 2478 - RNA, 23 nt, synthetic construct
  source 1..23: mol_type = other RNA
agcctcatgaaagaatgggagtt

SEQ ID NO: 2479 - RNA, 23 nt, synthetic construct
  source 1..23: mol_type = other RNA
aataggagtgcggtcttcctttt

SEQ ID NO: 2480 - RNA, 23 nt, synthetic construct
  source 1..23: mol_type = other RNA
agtgcactgaaatcggttttctt

SEQ ID NO: 2481 - RNA, 23 nt, synthetic construct
  source 1..23: mol_type = other RNA
aataagtcccttgtctctccctt

SEQ ID NO: 2482 - RNA, 23 nt, synthetic construct
  source 1..23: mol_type = other RNA
acctccagagttattaacatctt

SEQ ID NO: 2483 - RNA, 23 nt, synthetic construct
  source 1..23: mol_type = other RNA
tgaaagaatgggagtttggtgtt

SEQ ID NO: 2484 - RNA, 23 nt, synthetic construct
  source 1..23: mol_type = other RNA
ttctaagagttctccggttgctt

SEQ ID NO: 2485 - RNA, 23 nt, synthetic construct
  source 1..23: mol_type = other RNA
agattatgtaccgtctttgtgtt

SEQ ID NO: 2486 - RNA, 23 nt, synthetic construct
  source 1..23: mol_type = other RNA
aaatctatcttcaaacttccgtt

SEQ ID NO: 2487 - RNA, 23 nt, synthetic construct
  source 1..23: mol_type = other RNA
agctgcttaccatctctctgttt

SEQ ID NO: 2488 - RNA, 23 nt, synthetic construct
  source 1..23: mol_type = other RNA
accataagcgtagaaccgaggtt

SEQ ID NO: 2489 - RNA, 23 nt, synthetic construct
  source 1..23: mol_type = other RNA
aataagcgtagaaccgaggagtt

SEQ ID NO: 2490 - RNA, 23 nt, synthetic construct
  source 1..23: mol_type = other RNA
aggctccaatgcacgtttgcatt

SEQ ID NO: 2491 - RNA, 23 nt, synthetic construct
  source 1..23: mol_type = other RNA
agccataggagtgcggtcttctt

SEQ ID NO: 2492 - RNA, 23 nt, synthetic construct
  source 1..23: mol_type = other RNA
tttgttgataagtcccttgtctt

SEQ ID NO: 2493 - RNA, 23 nt, synthetic construct
  source 1..23: mol_type = other RNA
agtttagtactggatttctgatt

SEQ ID NO: 2494 - RNA, 23 nt, synthetic construct
  source 1..23: mol_type = other RNA
agctgcattttgatggtattttt

SEQ ID NO: 2495 - RNA, 23 nt, synthetic construct
  source 1..23: mol_type = other RNA
acggaatttggcaaggtcatttt

SEQ ID NO: 2496 - RNA, 23 nt, synthetic construct
  source 1..23: mol_type = other RNA
agtattttatcatccattgggtt

SEQ ID NO: 2497 - RNA, 23 nt, synthetic construct
  source 1..23: mol_type = other RNA
agcttcacattgctatcgtcttt

SEQ ID NO: 2498 - RNA, 23 nt, synthetic construct
  source 1..23: mol_type = other RNA
attcacattgctatcgtcttctt

SEQ ID NO: 2499 - RNA, 23 nt, synthetic construct
  source 1..23: mol_type = other RNA
aacattgctatcgtcttctgatt

SEQ ID NO: 2500 - RNA, 23 nt, synthetic construct
  source 1..23: mol_type = other RNA
attgctatcgtcttctgaccctt

SEQ ID NO: 2501 - RNA, 23 nt, synthetic construct
  source 1..23: mol_type = other RNA
ataggattatgtaccgtcttttt

SEQ ID NO: 2502 - RNA, 23 nt, synthetic construct
  source 1..23: mol_type = other RNA
aactggggcacttcggagacatt

SEQ ID NO: 2503 - RNA, 23 nt, synthetic construct
  source 1..23: mol_type = other RNA
agagcaaagaattccaaactatt

SEQ ID NO: 2504 - RNA, 23 nt, synthetic construct
  source 1..23: mol_type = other RNA
aatgaaagaatgggagtttggtt

SEQ ID NO: 2505 - RNA, 23 nt, synthetic construct
  source 1..23: mol_type = other RNA
taaacctgtaggattatgtactt

SEQ ID NO: 2506 - RNA, 23 nt, synthetic construct
  source 1..23: mol_type = other RNA
tagaaccgaggagagagcatgtt

SEQ ID NO: 2507 - RNA, 23 nt, synthetic construct
  source 1..23: mol_type = other RNA
accgaggagagagcatggggttt

SEQ ID NO: 2508 - RNA, 23 nt, synthetic construct
  source 1..23: mol_type = other RNA
tgttgttctacagctgatcggtt

SEQ ID NO: 2509 - RNA, 23 nt, synthetic construct
  source 1..23: mol_type = other RNA
atttctaagagttctccggtttt

SEQ ID NO: 2510 - RNA, 23 nt, synthetic construct
  source 1..23: mol_type = other RNA
aggaaagctccactactgtgttt

SEQ ID NO: 2511 - RNA, 23 nt, synthetic construct
  source 1..23: mol_type = other RNA
agacagactagacatgtattttt

SEQ ID NO: 2512 - RNA, 23 nt, synthetic construct
  source 1..23: mol_type = other RNA
tctatcttcaaacttccggattt

SEQ ID NO: 2513 - RNA, 23 nt, synthetic construct
  source 1..23: mol_type = other RNA
atttctgacgtttaggcttgctt

SEQ ID NO: 2514 - RNA, 23 nt, synthetic construct
  source 1..23: mol_type = other RNA
ttcgacttcctgagtattcaatt

SEQ ID NO: 2515 - RNA, 23 nt, synthetic construct
  source 1..23: mol_type = other RNA
aaatcatcaaggtggttgaactt

SEQ ID NO: 2516 - RNA, 23 nt, synthetic construct
  source 1..23: mol_type = other RNA
aaatctgcaatgtaaacagtatt

SEQ ID NO: 2517 - RNA, 23 nt, synthetic construct
  source 1..23: mol_type = other RNA
atctccggaatttggcaaggttt

SEQ ID NO: 2518 - RNA, 23 nt, synthetic construct
  source 1..23: mol_type = other RNA
atggtattttatcatccattgtt

SEQ ID NO: 2519 - RNA, 23 nt, synthetic construct
  source 1..23: mol_type = other RNA
aaggcaatggaaacaggagcctt

SEQ ID NO: 2520 - RNA, 23 nt, synthetic construct
  source 1..23: mol_type = other RNA
tttctcattagcaatctggtctt

SEQ ID NO: 2521 - RNA, 23 nt, synthetic construct
  source 1..23: mol_type = other RNA
atttccaattacaaaatgccttt

SEQ ID NO: 2522 - RNA, 23 nt, synthetic construct
  source 1..23: mol_type = other RNA
tttccaattacaaaatgcctatt

SEQ ID NO: 2523 - RNA, 23 nt, synthetic construct
  source 1..23: mol_type = other RNA
acctcacatggacttggaatctt

SEQ ID NO: 2524 - RNA, 23 nt, synthetic construct
  source 1..23: mol_type = other RNA
tcttcagccataggagtgcggtt

SEQ ID NO: 2525 - RNA, 23 nt, synthetic construct
  source 1..23: mol_type = other RNA
attgtcttcaaaatcccgaagtt

SEQ ID NO: 2526 - RNA, 23 nt, synthetic construct
  source 1..23: mol_type = other RNA
attcattgtggggctctcaaatt

SEQ ID NO: 2527 - RNA, 23 nt, synthetic construct
  source 1..23: mol_type = other RNA
aatcgtgcactgaaatcggtttt

SEQ ID NO: 2528 - RNA, 23 nt, synthetic construct
  source 1..23: mol_type = other RNA
atttgttgataagtcccttgttt

SEQ ID NO: 2529 - RNA, 23 nt, synthetic construct
  source 1..23: mol_type = other RNA
aacgggtcagtatagttttactt

SEQ ID NO: 2530 - RNA, 23 nt, synthetic construct
  source 1..23: mol_type = other RNA
atctgcaatgtaaacagtagatt

SEQ ID NO: 2531 - RNA, 23 nt, synthetic construct
  source 1..23: mol_type = other RNA
tctcaagttgggaaccaaaactt

SEQ ID NO: 2532 - RNA, 23 nt, synthetic construct
  source 1..23: mol_type = other RNA
aacttccaacacatagctcaatt

SEQ ID NO: 2533 - RNA, 23 nt, synthetic construct
  source 1..23: mol_type = other RNA
tacgattaagagcaaacttaatt

SEQ ID NO: 2534 - RNA, 23 nt, synthetic construct
  source 1..23: mol_type = other RNA
atccggaatttggcaaggtcatt

SEQ ID NO: 2535 - RNA, 23 nt, synthetic construct
  source 1..23: mol_type = other RNA
acgattaagagcaaacttaaatt

SEQ ID NO: 2536 - RNA, 23 nt, synthetic construct
  source 1..23: mol_type = other RNA
ttctacagctgatcggatggttt

SEQ ID NO: 2537 - RNA, 23 nt, synthetic construct
  source 1..23: mol_type = other RNA
aaatttggcaaggtcatttgttt

SEQ ID NO: 2538 - RNA, 23 nt, synthetic construct
  source 1..23: mol_type = other RNA
aagctgatcggatggttcttttt

SEQ ID NO: 2539 - RNA, 23 nt, synthetic construct
  source 1..23: mol_type = other RNA
agtgtttgacgataaaatcagtt

SEQ ID NO: 2540 - RNA, 23 nt, synthetic construct
  source 1..23: mol_type = other RNA
aagcgtagaaccgaggagagatt

SEQ ID NO: 2541 - RNA, 23 nt, synthetic construct
  source 1..23: mol_type = other RNA
attcgaatctatcttcaaacttt

SEQ ID NO: 2542 - RNA, 23 nt, synthetic construct
  source 1..23: mol_type = other RNA
tatagcaatctgcaatgtaaatt

SEQ ID NO: 2543 - RNA, 23 nt, synthetic construct
  source 1..23: mol_type = other RNA
atcggttttcagagtgaccattt

SEQ ID NO: 2544 - RNA, 23 nt, synthetic construct
  source 1..23: mol_type = other RNA
tgagatcgtgtggaattgagatt

SEQ ID NO: 2545 - RNA, 23 nt, synthetic construct
  source 1..23: mol_type = other RNA
tctctcatgagatcgtgtggatt

SEQ ID NO: 2546 - RNA, 23 nt, synthetic construct
  source 1..23: mol_type = other RNA
aacaagaccgtcctgattgtctt

SEQ ID NO: 2547 - RNA, 23 nt, synthetic construct
  source 1..23: mol_type = other RNA
agaaagcagggataggctctttt

SEQ ID NO: 2548 - RNA, 23 nt, synthetic construct
  source 1..23: mol_type = other RNA
atattcacaagaccgtcctgatt

SEQ ID NO: 2549 - RNA, 23 nt, synthetic construct
  source 1..23: mol_type = other RNA
atttagtactggatttctgactt

SEQ ID NO: 2550 - RNA, 23 nt, synthetic construct
  source 1..23: mol_type = other RNA
tagagcaaagaattccaaacttt

SEQ ID NO: 2551 - RNA, 23 nt, synthetic construct
  source 1..23: mol_type = other RNA
agtagagcaaagaattccaaatt

SEQ ID NO: 2552 - RNA, 23 nt, synthetic construct
  source 1..23: mol_type = other RNA
aaggtcatttgtccatttcagtt

SEQ ID NO: 2553 - RNA, 23 nt, synthetic construct
  source 1..23: mol_type = other RNA
tgtaggattatgtaccgtctttt

SEQ ID NO: 2554 - RNA, 23 nt, synthetic construct
  source 1..23: mol_type = other RNA
actttccatattcacaagacctt

SEQ ID NO: 2555 - RNA, 23 nt, synthetic construct
  source 1..23: mol_type = other RNA
acaatcatcaaggtggttgaatt

SEQ ID NO: 2556 - RNA, 23 nt, synthetic construct
  source 1..23: mol_type = other RNA
atttgctctatagaataaagttt

SEQ ID NO: 2557 - RNA, 23 nt, synthetic construct
  source 1..23: mol_type = other RNA
tcagccataggagtgcggtcttt

SEQ ID NO: 2558 - RNA, 23 nt, synthetic construct
  source 1..23: mol_type = other RNA
ttatcatccattggggaaatatt

SEQ ID NO: 2559 - RNA, 23 nt, synthetic construct
  source 1..23: mol_type = other RNA
acattgctatcgtcttctgactt

SEQ ID NO: 2560 - RNA, 23 nt, synthetic construct
  source 1..23: mol_type = other RNA
aagagccactttctcattagctt

SEQ ID NO: 2561 - RNA, 23 nt, synthetic construct
  source 1..23: mol_type = other RNA
tttaaaagctaactggtaatgtt

SEQ ID NO: 2562 - RNA, 23 nt, synthetic construct
  source 1..23: mol_type = other RNA
aactccttgaaattatagcaatt

SEQ ID NO: 2563 - RNA, 23 nt, synthetic construct
  source 1..23: mol_type = other RNA
atctgcaatgtaaacagtagatt

SEQ ID NO: 2564 - RNA, 23 nt, synthetic construct
  source 1..23: mol_type = other RNA
attagtagcatctcatttatttt

SEQ ID NO: 2565 - RNA, 23 nt, synthetic construct
  source 1..23: mol_type = other RNA
aaagtttgctctatagaataatt

SEQ ID NO: 2566 - RNA, 23 nt, synthetic construct
  source 1..23: mol_type = other RNA
aaacatcctaaagtgcatcattt

SEQ ID NO: 2567 - RNA, 23 nt, synthetic construct
  source 1..23: mol_type = other RNA
attatagcaatctgcaatgtatt

SEQ ID NO: 2568 - RNA, 23 nt, synthetic construct
  source 1..23: mol_type = other RNA
ttatagcaatctgcaatgtaatt

SEQ ID NO: 2569 - RNA, 23 nt, synthetic construct
  source 1..23: mol_type = other RNA
tttctcacgaccctttaaaactt

SEQ ID NO: 2570 - RNA, 23 nt, synthetic construct
  source 1..23: mol_type = other RNA
acacttccaacacatagctcatt

SEQ ID NO: 2571 - RNA, 23 nt, synthetic construct
  source 1..23: mol_type = other RNA
aaaacaggagccgatgccaaatt

SEQ ID NO: 2572 - RNA, 23 nt, synthetic construct
  source 1..23: mol_type = other RNA
atacatttaaacctgtaggattt

SEQ ID NO: 2573 - RNA, 23 nt, synthetic construct
  source 1..23: mol_type = other RNA
attatgtaccgtctttgtgtatt

SEQ ID NO: 2574 - RNA, 23 nt, synthetic construct
  source 1..23: mol_type = other RNA
ttctaagagttctccggttgctt

SEQ ID NO: 2575 - RNA, 23 nt, synthetic construct
  source 1..23: mol_type = other RNA
tgaaagaatgggagtttggtgtt

SEQ ID NO: 2576 - RNA, 23 nt, synthetic construct
  source 1..23: mol_type = other RNA
attgtcttcaaaatcccgaagtt

SEQ ID NO: 2577 - RNA, 23 nt, synthetic construct
  source 1..23: mol_type = other RNA
tctatcttcaaacttccggattt

SEQ ID NO: 2578 - RNA, 21 nt, synthetic construct
  source 1..21: mol_type = other RNA
ttctaagagttctccggtttt

SEQ ID NO: 2579 - RNA, 21 nt, synthetic construct
  source 1..21: mol_type = other RNA
ttctaagagttctccggtttt

SEQ ID NO: 2580 - RNA, 23 nt, synthetic construct
  source 1..23: mol_type = other RNA
aatgaaagaatgggagtttggtt

SEQ ID NO: 2581 - RNA, 23 nt, synthetic construct
  source 1..23: mol_type = other RNA
agtattttatcatccattgggtt

SEQ ID NO: 2582 - RNA, 23 nt, synthetic construct
  source 1..23: mol_type = other RNA
accataagcgtagaaccgaggtt

SEQ ID NO: 2583 - RNA, 21 nt, synthetic construct
  source 1..21: mol_type = other RNA
tctatcttcaaacttccggtt

SEQ ID NO: 2584 - RNA, 21 nt, synthetic construct
  source 1..21: mol_type = other RNA
tctatcttcaaacttccggtt

SEQ ID NO: 2585 - RNA, 21 nt, synthetic construct
  source 1..21: mol_type = other RNA
ttctaagagttctccggtttt

SEQ ID NO: 2586 - RNA, 21 nt, synthetic construct
  source 1..21: mol_type = other RNA
accataagcgtagaaccgatt

SEQ ID NO: 2587 - RNA, 21 nt, synthetic construct
  source 1..21: mol_type = other RNA
tgaaagaatgggagtttggtt

SEQ ID NO: 2588 - RNA, 21 nt, synthetic construct
  source 1..21: mol_type = other RNA
attgtcttcaaaatcccgatt

SEQ ID NO: 2589 - RNA, 21 nt, synthetic construct
  source 1..21: mol_type = other RNA
agtattttatcatccattgtt

SEQ ID NO: 2590 - RNA, 21 nt, synthetic construct
  source 1..21: mol_type = other RNA
accataagcgtagaaccgatt

SEQ ID NO: 2591 - RNA, 21 nt, synthetic construct
  source 1..21: mol_type = other RNA
ttctaagagttctccggtttt

SEQ ID NO: 2592 - RNA, 21 nt, synthetic construct
  source 1..21: mol_type = other RNA
tgaaagaatgggagtttggtt

SEQ ID NO: 2593 - RNA, 21 nt, synthetic construct
  source 1..21: mol_type = other RNA
attgtcttcaaaatcccgatt

SEQ ID NO: 2594 - RNA, 21 nt, synthetic construct
  source 1..21: mol_type = other RNA
agtattttatcatccattgtt

SEQ ID NO: 2595 - RNA, 23 nt, synthetic construct
  source 1..23: mol_type = other RNA
accataagcgtagaaccgaggtt

SEQ ID NO: 2596 - RNA, 23 nt, synthetic construct
  source 1..23: mol_type = other RNA
ttctaagagttctccggttgctt

SEQ ID NO: 2597 - RNA, 23 nt, synthetic construct
  source 1..23: mol_type = other RNA
tgaaagaatgggagtttggtgtt

SEQ ID NO: 2598 - RNA, 23 nt, synthetic construct
  source 1..23: mol_type = other RNA
attgtcttcaaaatcccgaagtt

SEQ ID NO: 2599 - RNA, 23 nt, synthetic construct
  source 1..23: mol_type = other RNA
agtattttatcatccattgggtt

SEQ ID NO: 2600 - RNA, 23 nt, synthetic construct
  source 1..23: mol_type = other RNA
accataagcgtagaaccgaggtt

SEQ ID NO: 2601 - RNA, 23 nt, synthetic construct
  source 1..23: mol_type = other RNA
ttctaagagttctccggttgctt

SEQ ID NO: 2602 - RNA, 23 nt, synthetic construct
  source 1..23: mol_type = other RNA
tgaaagaatgggagtttggtgtt

SEQ ID NO: 2603 - RNA, 23 nt, synthetic construct
  source 1..23: mol_type = other RNA
attgtcttcaaaatcccgaagtt

SEQ ID NO: 2604 - RNA, 23 nt, synthetic construct
  source 1..23: mol_type = other RNA
agtattttatcatccattgggtt

SEQ ID NO: 2605 - RNA, 23 nt, synthetic construct
  source 1..23: mol_type = other RNA
accataagcgtagaaccgaggtt

SEQ ID NO: 2606 - RNA, 23 nt, synthetic construct
  source 1..23: mol_type = other RNA
ttctaagagttctccggttgctt

SEQ ID NO: 2607 - RNA, 23 nt, synthetic construct
  source 1..23: mol_type = other RNA
tgaaagaatgggagtttggtgtt

SEQ ID NO: 2608 - RNA, 23 nt, synthetic construct
  source 1..23: mol_type = other RNA
attgtcttcaaaatcccgaagtt

SEQ ID NO: 2609 - RNA, 21 nt, synthetic construct
  source 1..21: mol_type = other RNA
ttctaagagttctccggtttt

SEQ ID NO: 2610 - RNA, 21 nt, synthetic construct
  source 1..21: mol_type = other RNA
accataagcgtagaaccgatt

SEQ ID NO: 2611 - RNA, 21 nt, synthetic construct
  source 1..21: mol_type = other RNA
tgaaagaatgggagtttggtt

SEQ ID NO: 2612 - RNA, 21 nt, synthetic construct
  source 1..21: mol_type = other RNA
attgtcttcaaaatcccgatt

SEQ ID NO: 2613 - RNA, 21 nt, synthetic construct
  source 1..21: mol_type = other RNA
agtattttatcatccattgtt

SEQ ID NO: 2614 - RNA, 21 nt, synthetic construct
  source 1..21: mol_type = other RNA
accataagcgtagaaccgatt

SEQ ID NO: 2615 - RNA, 21 nt, synthetic construct
  source 1..21: mol_type = other RNA
ttctaagagttctccggtttt

SEQ ID NO: 2616 - RNA, 21 nt, synthetic construct
  source 1..21: mol_type = other RNA
tgaaagaatgggagtttggtt

SEQ ID NO: 2617 - RNA, 21 nt, synthetic construct
  source 1..21: mol_type = other RNA
attgtcttcaaaatcccgatt

SEQ ID NO: 2618 - RNA, 21 nt, synthetic construct
  source 1..21: mol_type = other RNA
agtattttatcatccattgtt

SEQ ID NO: 2619 - RNA, 23 nt, synthetic construct
  source 1..23: mol_type = other RNA
accataagcgtagaaccgaggtt

SEQ ID NO: 2620 - RNA, 23 nt, synthetic construct
  source 1..23: mol_type = other RNA
ttctaagagttctccggttgctt

SEQ ID NO: 2621 - RNA, 23 nt, synthetic construct
  source 1..23: mol_type = other RNA
tgaaagaatgggagtttggtgtt

SEQ ID NO: 2622 - RNA, 23 nt, synthetic construct
  source 1..23: mol_type = other RNA
attgtcttcaaaatcccgaagtt

SEQ ID NO: 2623 - RNA, 23 nt, synthetic construct
  source 1..23: mol_type = other RNA
agtattttatcatccattgggtt

SEQ ID NO: 2624 - RNA, 23 nt, synthetic construct
  source 1..23: mol_type = other RNA
accataagcgtagaaccgaggtt

SEQ ID NO: 2625 - RNA, 23 nt, synthetic construct
  source 1..23: mol_type = other RNA
ttctaagagttctccggttgctt

SEQ ID NO: 2626 - RNA, 23 nt, synthetic construct
  source 1..23: mol_type = other RNA
tgaaagaatgggagtttggtgtt

SEQ ID NO: 2627 - RNA, 23 nt, synthetic construct
  source 1..23: mol_type = other RNA
attgtcttcaaaatcccgaagtt

SEQ ID NO: 2628 - RNA, 23 nt, synthetic construct
  source 1..23: mol_type = other RNA
agtattttatcatccattgggtt

SEQ ID NO: 2629 - RNA, 23 nt, synthetic construct
  source 1..23: mol_type = other RNA
accataagcgtagaaccgaggtt

SEQ ID NO: 2630 - RNA, 23 nt, synthetic construct
  source 1..23: mol_type = other RNA
ttctaagagttctccggttgctt

SEQ ID NO: 2631 - RNA, 23 nt, synthetic construct
  source 1..23: mol_type = other RNA
tgaaagaatgggagtttggtgtt

SEQ ID NO: 2632 - RNA, 23 nt, synthetic construct
  source 1..23: mol_type = other RNA
attgtcttcaaaatcccgaagtt

SEQ ID NO: 2633 - RNA, 23 nt, synthetic construct
  source 1..23: mol_type = other RNA
ttctacagctgatcggatggttt

SEQ ID NO: 2634 - RNA, 23 nt, synthetic construct
  source 1..23: mol_type = other RNA
actttccatattcacaagacctt

SEQ ID NO: 2635 - RNA, 23 nt, synthetic construct
  source 1..23: mol_type = other RNA
acacttccaacacatagctcatt

SEQ ID NO: 2636 - RNA, 23 nt, synthetic construct
  source 1..23: mol_type = other RNA
tgtaggattatgtaccgtctttt

SEQ ID NO: 2637 - RNA, 23 nt, synthetic construct
  source 1..23: mol_type = other RNA
tagagcaaagaattccaaacttt

SEQ ID NO: 2638 - RNA, 23 nt, synthetic construct
  source 1..23: mol_type = other RNA
agtagagcaaagaattccaaatt

SEQ ID NO: 2639 - RNA, 21 nt, synthetic construct
  source 1..21: mol_type = other RNA
ttctacagctgatcggatgtt

SEQ ID NO: 2640 - RNA, 21 nt, synthetic construct
  source 1..21: mol_type = other RNA
actttccatattcacaagatt

SEQ ID NO: 2641 - RNA, 21 nt, synthetic construct
  source 1..21: mol_type = other RNA
tgtaggattatgtaccgtctt

SEQ ID NO: 2642 - RNA, 21 nt, synthetic construct
  source 1..21: mol_type = other RNA
acacttccaacacatagcttt

SEQ ID NO: 2643 - RNA, 21 nt, synthetic construct
  source 1..21: mol_type = other RNA
agtagagcaaagaattccatt

SEQ ID NO: 2644 - RNA, 21 nt, synthetic construct
  source 1..21: mol_type = other RNA
tagagcaaagaattccaaatt

SEQ ID NO: 2645 - RNA, 21 nt, synthetic construct
  source 1..21: mol_type = other RNA
aactccttgaaattatagctt

SEQ ID NO: 2646 - RNA, 21 nt, synthetic construct
  source 1..21: mol_type = other RNA
ttctacagctgatcggatgtt

SEQ ID NO: 2647 - RNA, 21 nt, synthetic construct
  source 1..21: mol_type = other RNA
actttccatattcacaagatt

SEQ ID NO: 2648 - RNA, 21 nt, synthetic construct
  source 1..21: mol_type = other RNA
tgtaggattatgtaccgtctt

SEQ ID NO: 2649 - RNA, 21 nt, synthetic construct
  source 1..21: mol_type = other RNA
acacttccaacacatagcttt

SEQ ID NO: 2650 - RNA, 21 nt, synthetic construct
  source 1..21: mol_type = other RNA
agtagagcaaagaattccatt

SEQ ID NO: 2651 - RNA, 21 nt, synthetic construct
  source 1..21: mol_type = other RNA
tagagcaaagaattccaaatt

SEQ ID NO: 2652 - RNA, 21 nt, synthetic construct
  source 1..21: mol_type = other RNA
aactccttgaaattatagctt

SEQ ID NO: 2653 - RNA, 21 nt, synthetic construct
  source 1..21: mol_type = other RNA
ttctacagctgatcggatgtt

SEQ ID NO: 2654 - RNA, 21 nt, synthetic construct
  source 1..21: mol_type = other RNA
actttccatattcacaagatt

SEQ ID NO: 2655 - RNA, 21 nt, synthetic construct
  source 1..21: mol_type = other RNA
tgtaggattatgtaccgtctt

SEQ ID NO: 2656 - RNA, 21 nt, synthetic construct
  source 1..21: mol_type = other RNA
acacttccaacacatagcttt

SEQ ID NO: 2657 - RNA, 21 nt, synthetic construct
  source 1..21: mol_type = other RNA
agtagagcaaagaattccatt

SEQ ID NO: 2658 - RNA, 21 nt, synthetic construct
  source 1..21: mol_type = other RNA
tagagcaaagaattccaaatt

SEQ ID NO: 2659 - RNA, 21 nt, synthetic construct
  source 1..21: mol_type = other RNA
aactccttgaaattatagctt

SEQ ID NO: 2660 - RNA, 23 nt, synthetic construct
  source 1..23: mol_type = other RNA
ttctacagctgatcggatggttt

SEQ ID NO: 2661 - RNA, 23 nt, synthetic construct
  source 1..23: mol_type = other RNA
actttccatattcacaagacctt

SEQ ID NO: 2662 - RNA, 23 nt, synthetic construct
  source 1..23: mol_type = other RNA
tgtaggattatgtaccgtctttt

SEQ ID NO: 2663 - RNA, 23 nt, synthetic construct
  source 1..23: mol_type = other RNA
acacttccaacacatagctcatt

SEQ ID NO: 2664 - RNA, 23 nt, synthetic construct
  source 1..23: mol_type = other RNA
agtagagcaaagaattccaaatt

SEQ ID NO: 2665 - RNA, 23 nt, synthetic construct
  source 1..23: mol_type = other RNA
tagagcaaagaattccaaacttt

SEQ ID NO: 2666 - RNA, 23 nt, synthetic construct
  source 1..23: mol_type = other RNA
aactccttgaaattatagcaatt

SEQ ID NO: 2667 - RNA, 23 nt, synthetic construct
  source 1..23: mol_type = other RNA
ttctacagctgatcggatggttt

SEQ ID NO: 2668 - RNA, 23 nt, synthetic construct
  source 1..23: mol_type = other RNA
actttccatattcacaagacctt

SEQ ID NO: 2669 - RNA, 23 nt, synthetic construct
  source 1..23: mol_type = other RNA
tgtaggattatgtaccgtctttt

SEQ ID NO: 2670 - RNA, 23 nt, synthetic construct
  source 1..23: mol_type = other RNA
acacttccaacacatagctcatt

SEQ ID NO: 2671 - RNA, 23 nt, synthetic construct
  source 1..23: mol_type = other RNA
agtagagcaaagaattccaaatt

SEQ ID NO: 2672 - RNA, 23 nt, synthetic construct
  source 1..23: mol_type = other RNA
tagagcaaagaattccaaacttt

SEQ ID NO: 2673 - RNA, 23 nt, synthetic construct
  source 1..23: mol_type = other RNA
aactccttgaaattatagcaatt

SEQ ID NO: 2674 - RNA, 23 nt, synthetic construct
  source 1..23: mol_type = other RNA
ttctacagctgatcggatggttt

SEQ ID NO: 2675 - RNA, 23 nt, synthetic construct
  source 1..23: mol_type = other RNA
actttccatattcacaagacctt

SEQ ID NO: 2676 - RNA, 23 nt, synthetic construct
  source 1..23: mol_type = other RNA
tgtaggattatgtaccgtctttt

SEQ ID NO: 2677 - RNA, 23 nt, synthetic construct
  source 1..23: mol_type = other RNA
acacttccaacacatagctcatt

SEQ ID NO: 2678 - RNA, 23 nt, synthetic construct
  source 1..23: mol_type = other RNA
agtagagcaaagaattccaaatt

SEQ ID NO: 2679 - RNA, 23 nt, synthetic construct
  source 1..23: mol_type = other RNA
tagagcaaagaattccaaacttt

SEQ ID NO: 2680 - RNA, 23 nt, synthetic construct
  source 1..23: mol_type = other RNA
aactccttgaaattatagcaatt

SEQ ID NO: 2681 - RNA, 23 nt, synthetic construct
  source 1..23: mol_type = other RNA
tggtgtcttacatttcctggttt

SEQ ID NO: 2682 - RNA, 23 nt, synthetic construct
  source 1..23: mol_type = other RNA
ttggtgtcttacatttcctggtt

SEQ ID NO: 2683 - RNA, 23 nt, synthetic construct
  source 1..23: mol_type = other RNA
aactttcaaaacatacgagggtt

SEQ ID NO: 2684 - RNA, 23 nt, synthetic construct
  source 1..23: mol_type = other RNA
aacgaccctttaaaactgaaatt

SEQ ID NO: 2685 - RNA, 23 nt, synthetic construct
  source 1..23: mol_type = other RNA
atcacgaccctttaaaactgatt

SEQ ID NO: 2686 - RNA, 23 nt, synthetic construct
  source 1..23: mol_type = other RNA
tctcacgaccctttaaaactgtt

SEQ ID NO: 2687 - RNA, 23 nt, synthetic construct
  source 1..23: mol_type = other RNA
agtttctcacgaccctttaaatt

SEQ ID NO: 2688 - RNA, 23 nt, synthetic construct
  source 1..23: mol_type = other RNA
aaacacatagctcaagcttcctt

SEQ ID NO: 2689 - RNA, 23 nt, synthetic construct
  source 1..23: mol_type = other RNA
acaacacatagctcaagcttctt

SEQ ID NO: 2690 - RNA, 23 nt, synthetic construct
  source 1..23: mol_type = other RNA
ttccaacacatagctcaagcttt

SEQ ID NO: 2691 - RNA, 23 nt, synthetic construct
  source 1..23: mol_type = other RNA
attccaacacatagctcaagctt

SEQ ID NO: 2692 - RNA, 23 nt, synthetic construct
  source 1..23: mol_type = other RNA
acttccaacacatagctcaagtt

SEQ ID NO: 2693 - RNA, 23 nt, synthetic construct
  source 1..23: mol_type = other RNA
agcacttccaacacatagctctt

SEQ ID NO: 2694 - RNA, 23 nt, synthetic construct
  source 1..23: mol_type = other RNA
aaaccagggcacttccaacactt

SEQ ID NO: 2695 - RNA, 23 nt, synthetic construct
  source 1..23: mol_type = other RNA
aattaaaaccagggcacttcctt

SEQ ID NO: 2696 - RNA, 23 nt, synthetic construct
  source 1..23: mol_type = other RNA
aggattatgtaccgtctttgttt

SEQ ID NO: 2697 - RNA, 23 nt, synthetic construct
  source 1..23: mol_type = other RNA
taggattatgtaccgtctttgtt

SEQ ID NO: 2698 - RNA, 23 nt, synthetic construct
  source 1..23: mol_type = other RNA
atttaaacctgtaggattatgtt

SEQ ID NO: 2699 - RNA, 23 nt, synthetic construct
  source 1..23: mol_type = other RNA
acaatgtaaacagtagagcaatt

SEQ ID NO: 2700 - RNA, 23 nt, synthetic construct
  source 1..23: mol_type = other RNA
aactccttgaaattatagcaatt

SEQ ID NO: 2701 - RNA, 23 nt, synthetic construct
  source 1..23: mol_type = other RNA
aacatcctaaagtgcatcatttt

SEQ ID NO: 2702 - RNA, 23 nt, synthetic construct
  source 1..23: mol_type = other RNA
aaacatcctaaagtgcatcattt

SEQ ID NO: 2703 - RNA, 23 nt, synthetic construct
  source 1..23: mol_type = other RNA
agtcatgtgaatgattcatgttt

SEQ ID NO: 2704 - RNA, 23 nt, synthetic construct
  source 1..23: mol_type = other RNA
tggtcatgtgaatgattcatgtt

SEQ ID NO: 2705 - RNA, 23 nt, synthetic construct
  source 1..23: mol_type = other RNA
aggacagactagacatgtatttt

SEQ ID NO: 2706 - RNA, 23 nt, synthetic construct
  source 1..23: mol_type = other RNA
attaaaggacagactagacattt

SEQ ID NO: 2707 - RNA, 23 nt, synthetic construct
  source 1..23: mol_type = other RNA
ataactggtaatgatctgatttt

SEQ ID NO: 2708 - RNA, 23 nt, synthetic construct
  source 1..23: mol_type = other RNA
agctaactggtaatgatctgatt

SEQ ID NO: 2709 - RNA, 23 nt, synthetic construct
  source 1..23: mol_type = other RNA
aaagctaactggtaatgatcttt

SEQ ID NO: 2710 - RNA, 23 nt, synthetic construct
  source 1..23: mol_type = other RNA
ttaaaagctaactggtaatgatt

SEQ ID NO: 2711 - RNA, 23 nt, synthetic construct
  source 1..23: mol_type = other RNA
atgctttaaaagctaactggttt

SEQ ID NO: 2712 - RNA, 23 nt, synthetic construct
  source 1..23: mol_type = other RNA
tagtcttaaacaaatgtgctttt

SEQ ID NO: 2713 - RNA, 23 nt, synthetic construct
  source 1..23: mol_type = other RNA
aatagtcttaaacaaatgtgctt

SEQ ID NO: 2714 - RNA, 23 nt, synthetic construct
  source 1..23: mol_type = other RNA
aaaacaattagtagcatctcatt

SEQ ID NO: 2715 - RNA, 23 nt, synthetic construct
  source 1..23: mol_type = other RNA
atggggattcctgaataaatctt

SEQ ID NO: 2716 - RNA, 23 nt, synthetic construct
  source 1..23: mol_type = other RNA
attataattggccacacagcatt

SEQ ID NO: 2717 - RNA, 23 nt, synthetic construct
  source 1..23: mol_type = other RNA
agggtcagtatagttttacattt

SEQ ID NO: 2718 - RNA, 23 nt, synthetic construct
  source 1..23: mol_type = other RNA
aaacgggtcagtatagttttatt

SEQ ID NO: 2719 - RNA, 23 nt, synthetic construct
  source 1..23: mol_type = other RNA
aattggaccagccagtttctctt

SEQ ID NO: 2720 - RNA, 23 nt, synthetic construct
  source 1..23: mol_type = other RNA
tgttgctgtaaatcccattggtt

SEQ ID NO: 2721 - RNA, 23 nt, synthetic construct
  source 1..23: mol_type = other RNA
acatacgattaagagcaaacttt

SEQ ID NO: 2722 - RNA, 23 nt, synthetic construct
  source 1..23: mol_type = other RNA
tccatacgattaagagcaaactt

SEQ ID NO: 2723 - RNA, 23 nt, synthetic construct
  source 1..23: mol_type = other RNA
ttccatacgattaagagcaaatt

SEQ ID NO: 2724 - RNA, 23 nt, synthetic construct
  source 1..23: mol_type = other RNA
acttccatacgattaagagcatt

SEQ ID NO: 2725 - RNA, 23 nt, synthetic construct
  source 1..23: mol_type = other RNA
tcaagcttccatacgattaagtt

SEQ ID NO: 2726 - RNA, 23 nt, synthetic construct
  source 1..23: mol_type = other RNA
atcaagcttccatacgattaatt

SEQ ID NO: 2727 - RNA, 23 nt, synthetic construct
  source 1..23: mol_type = other RNA
tgtaccgtctttgtgtatggatt

SEQ ID NO: 2728 - RNA, 23 nt, synthetic construct
  source 1..23: mol_type = other RNA
tatgtaccgtctttgtgtatgtt

SEQ ID NO: 2729 - RNA, 23 nt, synthetic construct
  source 1..23: mol_type = other RNA
tattaaaggacagactagacatt

SEQ ID NO: 2730 - RNA, 23 nt, synthetic construct
  source 1..23: mol_type = other RNA
actattaaaggacagactagatt

SEQ ID NO: 2731 - RNA, 23 nt, synthetic construct
  source 1..23: mol_type = other RNA
agctattaaaggacagactagtt

SEQ ID NO: 2732 - RNA, 23 nt, synthetic construct
  source 1..23: mol_type = other RNA
aagagctattaaaggacagactt

SEQ ID NO: 2733 - RNA, 23 nt, synthetic construct
  source 1..23: mol_type = other RNA
aagagttctccggttgcagactt

SEQ ID NO: 2734 - RNA, 23 nt, synthetic construct
  source 1..23: mol_type = other RNA
taagagttctccggttgcagatt

SEQ ID NO: 2735 - RNA, 23 nt, synthetic construct
  source 1..23: mol_type = other RNA
tctaagagttctccggttgcatt

SEQ ID NO: 2736 - RNA, 23 nt, synthetic construct
  source 1..23: mol_type = other RNA
tcccatgtcgaacttcatccttt

SEQ ID NO: 2737 - RNA, 23 nt, synthetic construct
  source 1..23: mol_type = other RNA
ttttctttgttgataagtccctt

SEQ ID NO: 2738 - RNA, 23 nt, synthetic construct
  source 1..23: mol_type = other RNA
agttgaacccagaaggagtattt

SEQ ID NO: 2739 - RNA, 23 nt, synthetic construct
  source 1..23: mol_type = other RNA
aatttctgacgtttaggcttgtt

SEQ ID NO: 2740 - RNA, 23 nt, synthetic construct
  source 1..23: mol_type = other RNA
agatttctgacgtttaggctttt

SEQ ID NO: 2741 - RNA, 23 nt, synthetic construct
  source 1..23: mol_type = other RNA
aaaatgctgagtgtgtccacctt

SEQ ID NO: 2742 - RNA, 23 nt, synthetic construct
  source 1..23: mol_type = other RNA
agcacttcggagacaaagctctt

SEQ ID NO: 2743 - RNA, 23 nt, synthetic construct
  source 1..23: mol_type = other RNA
aactggggcacttcggagacatt

SEQ ID NO: 2744 - RNA, 23 nt, synthetic construct
  source 1..23: mol_type = other RNA
atagaaccgaggagagagcattt

SEQ ID NO: 2745 - RNA, 23 nt, synthetic construct
  source 1..23: mol_type = other RNA
tctgaatccttcgtgtgagcttt

SEQ ID NO: 2746 - RNA, 23 nt, synthetic construct
  source 1..23: mol_type = other RNA
aggaaggtctgtacttcttcttt

SEQ ID NO: 2747 - RNA, 23 nt, synthetic construct
  source 1..23: mol_type = other RNA
tgggaaggtctgtacttcttctt

SEQ ID NO: 2748 - RNA, 23 nt, synthetic construct
  source 1..23: mol_type = other RNA
atgggaaggtctgtacttctttt

SEQ ID NO: 2749 - RNA, 23 nt, synthetic construct
  source 1..23: mol_type = other RNA
aggtcatttgtccatttcagatt

SEQ ID NO: 2750 - RNA, 23 nt, synthetic construct
  source 1..23: mol_type = other RNA
aggaatttggcaaggtcattttt

SEQ ID NO: 2751 - RNA, 23 nt, synthetic construct
  source 1..23: mol_type = other RNA
accgcatcctgggagttaggttt

SEQ ID NO: 2752 - RNA, 23 nt, synthetic construct
  source 1..23: mol_type = other RNA
atgtgttgcttcgctgccgcatt

SEQ ID NO: 2753 - RNA, 23 nt, synthetic construct
  source 1..23: mol_type = other RNA
tcgttctttgttaccggccgttt

SEQ ID NO: 2754 - RNA, 23 nt, synthetic construct
  source 1..23: mol_type = other RNA
attcgttctttgttaccggcctt

SEQ ID NO: 2755 - RNA, 23 nt, synthetic construct
  source 1..23: mol_type = other RNA
ttgctatcgtcttctgacccctt

SEQ ID NO: 2756 - RNA, 23 nt, synthetic construct
  source 1..23: mol_type = other RNA
actgatcggatggttctttcttt

SEQ ID NO: 2757 - RNA, 23 nt, synthetic construct
  source 1..23: mol_type = other RNA
atacagctgatcggatggttctt

SEQ ID NO: 2758 - RNA, 23 nt, synthetic construct
  source 1..23: mol_type = other RNA
aatgctgatagtgttccagattt

SEQ ID NO: 2759 - RNA, 23 nt, synthetic construct
  source 1..23: mol_type = other RNA
acccagaaggagtattttctttt

SEQ ID NO: 2760 - RNA, 23 nt, synthetic construct
  source 1..23: mol_type = other RNA
taccttttcgacttcctgagttt

SEQ ID NO: 2761 - RNA, 23 nt, synthetic construct
  source 1..23: mol_type = other RNA
agtttaggcttgctcctttcttt

SEQ ID NO: 2762 - RNA, 23 nt, synthetic construct
  source 1..23: mol_type = other RNA
atgacgtttaggcttgctccttt

SEQ ID NO: 2763 - RNA, 23 nt, synthetic construct
  source 1..23: mol_type = other RNA
tctgacgtttaggcttgctcctt

SEQ ID NO: 2764 - RNA, 23 nt, synthetic construct
  source 1..23: mol_type = other RNA
tttctgacgtttaggcttgcttt

SEQ ID NO: 2765 - RNA, 23 nt, synthetic construct
  source 1..23: mol_type = other RNA
tcgtgtggaattgagactttctt

SEQ ID NO: 2766 - RNA, 23 nt, synthetic construct
  source 1..23: mol_type = other RNA
aagatcgtgtggaattgagactt

SEQ ID NO: 2767 - RNA, 23 nt, synthetic construct
  source 1..23: mol_type = other RNA
aatgagatcgtgtggaattgatt

SEQ ID NO: 2768 - RNA, 23 nt, synthetic construct
  source 1..23: mol_type = other RNA
tcatgagatcgtgtggaattgtt

SEQ ID NO: 2769 - RNA, 23 nt, synthetic construct
  source 1..23: mol_type = other RNA
tctcatgagatcgtgtggaattt

SEQ ID NO: 2770 - RNA, 23 nt, synthetic construct
  source 1..23: mol_type = other RNA
atctcatgagatcgtgtggaatt

SEQ ID NO: 2771 - RNA, 23 nt, synthetic construct
  source 1..23: mol_type = other RNA
tcaggtccagttctctcatgatt

SEQ ID NO: 2772 - RNA, 23 nt, synthetic construct
  source 1..23: mol_type = other RNA
atcaggtccagttctctcatgtt

SEQ ID NO: 2773 - RNA, 23 nt, synthetic construct
  source 1..23: mol_type = other RNA
tggtgtcagataggctgggattt

SEQ ID NO: 2774 - RNA, 23 nt, synthetic construct
  source 1..23: mol_type = other RNA
ttggtgtcagataggctgggatt

SEQ ID NO: 2775 - RNA, 23 nt, synthetic construct
  source 1..23: mol_type = other RNA
tttggtgtcagataggctgggtt

SEQ ID NO: 2776 - RNA, 23 nt, synthetic construct
  source 1..23: mol_type = other RNA
aggcatcttgatttctctgcttt

SEQ ID NO: 2777 - RNA, 23 nt, synthetic construct
  source 1..23: mol_type = other RNA
atccgactggggcacttcggatt

SEQ ID NO: 2778 - RNA, 23 nt, synthetic construct
  source 1..23: mol_type = other RNA
atcttcttcgaatctatcttctt

SEQ ID NO: 2779 - RNA, 23 nt, synthetic construct
  source 1..23: mol_type = other RNA
agggagtgtgttgcttcgctgtt

SEQ ID NO: 2780 - RNA, 23 nt, synthetic construct
  source 1..23: mol_type = other RNA
ttggggagtgtgttgcttcgctt

SEQ ID NO: 2781 - RNA, 23 nt, synthetic construct
  source 1..23: mol_type = other RNA
tagattccaatgtggcttcaatt

SEQ ID NO: 2782 - RNA, 23 nt, synthetic construct
  source 1..23: mol_type = other RNA
accgttcgttctttgttaccgtt

SEQ ID NO: 2783 - RNA, 23 nt, synthetic construct
  source 1..23: mol_type = other RNA
actgtcgtatagtggcttcattt

SEQ ID NO: 2784 - RNA, 23 nt, synthetic construct
  source 1..23: mol_type = other RNA
accggtacctgtcgtatagtgtt

SEQ ID NO: 2785 - RNA, 23 nt, synthetic construct
  source 1..23: mol_type = other RNA
aactccttgaaattatagcaatt

SEQ ID NO: 2786 - RNA, 18 nt, synthetic construct
  source 1..18: mol_type = other RNA
gaaagattccaggacgat

SEQ ID NO: 2787 - RNA, 21 nt, synthetic construct
  source 1..21: mol_type = other RNA
tatcgtcctggaatctttctg

SEQ ID NO: 2788 - RNA, 18 nt, synthetic construct
  source 1..18: mol_type = other RNA
gaatcaagatggtgaaga

SEQ ID NO: 2789 - RNA, 22 nt, synthetic construct
  source 1..22: mol_type = other RNA
atcttcaccatcttgattcctc

SEQ ID NO: 2790 - RNA, 20 nt, synthetic construct
  source 1..20: mol_type = other RNA
aggaatcaagatggtgaaga

SEQ ID NO: 2791 - RNA, 23 nt, synthetic construct
  source 1..23: mol_type = other RNA
atcttcaccatcttgattcctct

SEQ ID NO: 2792 - RNA, 18 nt, synthetic construct
  source 1..18: mol_type = other RNA
gaaagattccaggacgat

SEQ ID NO: 2793 - RNA, 21 nt, synthetic construct
  source 1..21: mol_type = other RNA
tatcgtcctggaatctttctg

SEQ ID NO: 2794 - RNA, 18 nt, synthetic construct
  source 1..18: mol_type = other RNA
gaatcaagatggtgaaga

SEQ ID NO: 2795 - RNA, 21 nt, synthetic construct
  source 1..21: mol_type = other RNA
atcttcaccatcttgattcct

SEQ ID NO: 2796 - RNA, 20 nt, synthetic construct
  source 1..20: mol_type = other RNA
aggaatcaagatggtgaaga

SEQ ID NO: 2797 - RNA, 23 nt, synthetic construct
  source 1..23: mol_type = other RNA
atcttcaccatcttgattcctct

SEQ ID NO: 2798 - DNA, 22 bp, synthetic construct
  source 1..22: mol_type = other DNA
ctatgtgcaggagagaaccatc

SEQ ID NO: 2799 - DNA, 21 bp, synthetic construct
  source 1..21: mol_type = other DNA
gcccttcagctcgattctatt

SEQ ID NO: 2800 - DNA, 24 bp, synthetic construct
  source 1..24: mol_type = other DNA
tacaagacccgcgctgaagtcaag

SEQ ID NO: 2801 - DNA, 20 bp, synthetic construct
  source 1..20: mol_type = other DNA
tcatctgcaccactggaaag

SEQ ID NO: 2802 - DNA, 23 bp, synthetic construct
  source 1..23: mol_type = other DNA
ctgcttcatatggtctgggtatc

SEQ ID NO: 2803 - DNA, 24 bp, synthetic construct
  source 1..24: mol_type = other DNA
ccaacactggtcactaccctcacc

SEQ ID NO: 2804 - DNA, 16 bp, synthetic construct
  source 1..16: mol_type = other DNA
gccagccatctgttgt

SEQ ID NO: 2805 - DNA, 16 bp, synthetic construct
  source 1..16: mol_type = other DNA
ggagtggcaccttcca

SEQ ID NO: 2806 - DNA, 21 bp, synthetic construct
  source 1..21: mol_type = other DNA
tcccccgtgccttccttgacc

SEQ ID NO: 2807 - RNA, 21 nt, synthetic construct
  source 1..21: mol_type = other RNA
cgaagacagcgaccccatgct

SEQ ID NO: 2808 - RNA, 21 nt, synthetic construct
  source 1..21: mol_type = other RNA
agcatggggtcgctgtcttcg

SEQ ID NO: 2809 - RNA, 21 nt, synthetic construct
  source 1..21: mol_type = other RNA
catggacggccggtaacaaag

SEQ ID NO: 2810 - RNA, 21 nt, synthetic construct
  source 1..21: mol_type = other RNA
ctttgttaccggccgtccatg

SEQ ID NO: 2811 - RNA, 21 nt, synthetic construct
  source 1..21: mol_type = other RNA
tgcacatgcgcacgcgcatgc

SEQ ID NO: 2812 - RNA, 21 nt, synthetic construct
  source 1..21: mol_type = other RNA
gcatgcgcgtgcgcatgtgca

SEQ ID NO: 2813 - RNA, 21 nt, synthetic construct
  source 1..21: mol_type = other RNA
gcacatgcgcacgcgcatgca

SEQ ID NO: 2814 - RNA, 21 nt, synthetic construct
  source 1..21: mol_type = other RNA
tgcatgcgcgtgcgcatgtgc

SEQ ID NO: 2815 - RNA, 21 nt, synthetic construct
  source 1..21: mol_type = other RNA
cacatgcgcacgcgcatgcac

SEQ ID NO: 2816 - RNA, 21 nt, synthetic construct
  source 1..21: mol_type = other RNA
gtgcatgcgcgtgcgcatgtg

SEQ ID NO: 2817 - RNA, 21 nt, synthetic construct
  source 1..21: mol_type = other RNA
acatgcgcacgcgcatgcacg

SEQ ID NO: 2818 - RNA, 21 nt, synthetic construct
  source 1..21: mol_type = other RNA
cgtgcatgcgcgtgcgcatgt

SEQ ID NO: 2819 - RNA, 21 nt, synthetic construct
  source 1..21: mol_type = other RNA
tctgcactaaaatccccaaac

SEQ ID NO: 2820 - RNA, 21 nt, synthetic construct
  source 1..21: mol_type = other RNA
gtttggggattttagtgcaga

SEQ ID NO: 2821 - RNA, 20 nt, synthetic construct
  source 1..20: mol_type = other RNA
acagtagtggagctttccta

SEQ ID NO: 2822 - RNA, 23 nt, synthetic construct
  source 1..23: mol_type = other RNA
ttaggaaagctccactactgttt

SEQ ID NO: 2823 - RNA, 20 nt, synthetic construct
  source 1..20: mol_type = other RNA
cacgatggcagtgcagtcat

SEQ ID NO: 2824 - RNA, 23 nt, synthetic construct
  source 1..23: mol_type = other RNA
aatgactgcactgccatcgtgtt

SEQ ID NO: 2825 - RNA, 20 nt, synthetic construct
  source 1..20: mol_type = other RNA
ttttggtccctgcctaggac

SEQ ID NO: 2826 - RNA, 23 nt, synthetic construct
  source 1..23: mol_type = other RNA
agtcctaggcagggaccaaaatt

SEQ ID NO: 2827 - RNA, 20 nt, synthetic construct
  source 1..20: mol_type = other RNA
ttttaaagggtcgtgagaaa

SEQ ID NO: 2828 - RNA, 23 nt, synthetic construct
  source 1..23: mol_type = other RNA
atttctcacgaccctttaaaatt

SEQ ID NO: 2829 - RNA, 20 nt, synthetic construct
  source 1..20: mol_type = other RNA
aatacatgtctagtctgtcc

SEQ ID NO: 2830 - RNA, 23 nt, synthetic construct
  source 1..23: mol_type = other RNA
aggacagactagacatgtatttt

SEQ ID NO: 2831 - RNA, 20 nt, synthetic construct
  source 1..20: mol_type = other RNA
gcaaccggagaactcttaga

SEQ ID NO: 2832 - RNA, 20 nt, synthetic construct
  source 1..20: mol_type = other RNA
cctcggttctacgcttatgg

SEQ ID NO: 2833 - RNA, 20 nt, synthetic construct
  source 1..20: mol_type = other RNA
gcaaccggagaactcttaga

SEQ ID NO: 2834 - RNA, 20 nt, synthetic construct
  source 1..20: mol_type = other RNA
caatggatgataaaatactt

SEQ ID NO: 2835 - RNA, 20 nt, synthetic construct
  source 1..20: mol_type = other RNA
ccaaactcccattctttcat

SEQ ID NO: 2836 - RNA, 20 nt, synthetic construct
  source 1..20: mol_type = other RNA
ggtcttgtgaatatggaaag

SEQ ID NO: 2837 - RNA, 20 nt, synthetic construct
  source 1..20: mol_type = other RNA
accatccgatcagctgtaga

SEQ ID NO: 2838 - RNA, 20 nt, synthetic construct
  source 1..20: mol_type = other RNA
tttggaattctttgctctac

SEQ ID NO: 2839 - RNA, 20 nt, synthetic construct
  source 1..20: mol_type = other RNA
agtttggaattctttgctct

SEQ ID NO: 2840 - RNA, 20 nt, synthetic construct
  source 1..20: mol_type = other RNA
aagacggtacataatcctac

SEQ ID NO: 2841 - RNA, 20 nt, synthetic construct
  source 1..20: mol_type = other RNA
tgagctatgtgttggaagtg

SEQ ID NO: 2842 - RNA, 20 nt, synthetic construct
  source 1..20: mol_type = other RNA
caccaaactcccattctttc

SEQ ID NO: 2843 - RNA, 20 nt, synthetic construct
  source 1..20: mol_type = other RNA
gcaaccggagaactcttaga

SEQ ID NO: 2844 - RNA, 20 nt, synthetic construct
  source 1..20: mol_type = other RNA
cctcggttctacgcttatgg

SEQ ID NO: 2845 - RNA, 20 nt, synthetic construct
  source 1..20: mol_type = other RNA
cccaatggatgataaaatac

SEQ ID NO: 2846 - RNA, 20 nt, synthetic construct
  source 1..20: mol_type = other RNA
ttgctataatttcaaggagt

SEQ ID NO: 2847 - RNA, 20 nt, synthetic construct
  source 1..20: mol_type = other RNA
aagacggtacataatcctac

SEQ ID NO: 2848 - RNA, 20 nt, synthetic construct
  source 1..20: mol_type = other RNA
agtttggaattctttgctct

SEQ ID NO: 2849 - RNA, 20 nt, synthetic construct
  source 1..20: mol_type = other RNA
aagacggtacataatcctac

SEQ ID NO: 2850 - RNA, 20 nt, synthetic construct
  source 1..20: mol_type = other RNA
aagacggtacataatcctac

SEQ ID NO: 2851 - RNA, 20 nt, synthetic construct
  source 1..20: mol_type = other RNA
ggtcttgtgaatatggaaag

SEQ ID NO: 2852 - RNA, 20 nt, synthetic construct
  source 1..20: mol_type = other RNA
tggaattctttgctctactt

SEQ ID NO: 2853 - RNA, 20 nt, synthetic construct
  source 1..20: mol_type = other RNA
gacggtacataatcctacat

SEQ ID NO: 2854 - RNA, 20 nt, synthetic construct
  source 1..20: mol_type = other RNA
tttggaattctttgctctat

SEQ ID NO: 2855 - RNA, 20 nt, synthetic construct
  source 1..20: mol_type = other RNA
tggaattctttgctctactt

SEQ ID NO: 2856 - RNA, 20 nt, synthetic construct
  source 1..20: mol_type = other RNA
gacggtacataatcctacat

SEQ ID NO: 2857 - RNA, 20 nt, synthetic construct
  source 1..20: mol_type = other RNA
catccgatcagctgtagaat

SEQ ID NO: 2858 - RNA, 20 nt, synthetic construct
  source 1..20: mol_type = other RNA
gctataatttcaaggagttt

SEQ ID NO: 2859 - RNA, 20 nt, synthetic construct
  source 1..20: mol_type = other RNA
tttggaattctttgctctat

SEQ ID NO: 2860 - RNA, 20 nt, synthetic construct
  source 1..20: mol_type = other RNA
tggaattctttgctctactt

SEQ ID NO: 2861 - RNA, 20 nt, synthetic construct
  source 1..20: mol_type = other RNA
gacggtacataatcctacat

SEQ ID NO: 2862 - RNA, 20 nt, synthetic construct
  source 1..20: mol_type = other RNA
gacggtacataatcctacat

SEQ ID NO: 2863 - RNA, 20 nt, synthetic construct
  source 1..20: mol_type = other RNA
gacggtacataatcctacat

SEQ ID NO: 2864 - RNA, 20 nt, synthetic construct
  source 1..20: mol_type = other RNA
gacggtacataatcctacat

SEQ ID NO: 2865 - RNA, 20 nt, synthetic construct
  source 1..20: mol_type = other RNA
aagacggtacataatcctac

SEQ ID NO: 2866 - RNA, 20 nt, synthetic construct
  source 1..20: mol_type = other RNA
tggaattctttgctctactt

SEQ ID NO: 2867 - RNA, 20 nt, synthetic construct
  source 1..20: mol_type = other RNA
tttggaattctttgctctat

SEQ ID NO: 2868 - RNA, 20 nt, synthetic construct
  source 1..20: mol_type = other RNA
gacggtacataatcctacat

SEQ ID NO: 2869 - RNA, 20 nt, synthetic construct
  source 1..20: mol_type = other RNA
tggaattctttgctctactt

SEQ ID NO: 2870 - RNA, 20 nt, synthetic construct
  source 1..20: mol_type = other RNA
tttggaattctttgctctat

SEQ ID NO: 2871 - RNA, 20 nt, synthetic construct
  source 1..20: mol_type = other RNA
gacggtacataatcctacat

SEQ ID NO: 2872 - RNA, 20 nt, synthetic construct
  source 1..20: mol_type = other RNA
tggaattctttgctctactt

SEQ ID NO: 2873-2874 - skipped (2 entries)

SEQ ID NO: 2875 - RNA, 20 nt, synthetic construct
  source 1..20: mol_type = other RNA
aatcagatcattaccagtta

SEQ ID NO: 2876 - RNA, 20 nt, synthetic construct
  source 1..20: mol_type = other RNA
ctagtctgtcctttaatagc

SEQ ID NO: 2877 - RNA, 20 nt, synthetic construct
  source 1..20: mol_type = other RNA
gcacatttgtttaagactat

SEQ ID NO: 2878 - RNA, 20 nt, synthetic construct
  source 1..20: mol_type = other RNA
ccaatgggatttacagcaac

SEQ ID NO: 2879 - RNA, 20 nt, synthetic construct
  source 1..20: mol_type = other RNA
gtttgctcttaatcgtatgg

SEQ ID NO: 2880 - RNA, 20 nt, synthetic construct
  source 1..20: mol_type = other RNA
ccctcgtatgttttgaaagt

SEQ ID NO: 2881 - RNA, 20 nt, synthetic construct
  source 1..20: mol_type = other RNA
aatcagatcattaccagtta

SEQ ID NO: 2882 - RNA, 20 nt, synthetic construct
  source 1..20: mol_type = other RNA
ctagtctgtcctttaatagc

SEQ ID NO: 2883 - RNA, 20 nt, synthetic construct
  source 1..20: mol_type = other RNA
gcacatttgtttaagactat

SEQ ID NO: 2884 - RNA, 20 nt, synthetic construct
  source 1..20: mol_type = other RNA
ccaatgggatttacagcaac

SEQ ID NO: 2885 - RNA, 20 nt, synthetic construct
  source 1..20: mol_type = other RNA
gtttgctcttaatcgtatgg

SEQ ID NO: 2886 - RNA, 20 nt, synthetic construct
  source 1..20: mol_type = other RNA
ccctcgtatgttttgaaagt

SEQ ID NO: 2887 - RNA, 20 nt, synthetic construct
  source 1..20: mol_type = other RNA
aatcagatcattaccagtta

SEQ ID NO: 2888 - RNA, 20 nt, synthetic construct
  source 1..20: mol_type = other RNA
ctagtctgtcctttaatagc

SEQ ID NO: 2889 - RNA, 20 nt, synthetic construct
  source 1..20: mol_type = other RNA
gcacatttgtttaagactat

SEQ ID NO: 2890 - RNA, 20 nt, synthetic construct
  source 1..20: mol_type = other RNA
ccaatgggatttacagcaac

SEQ ID NO: 2891 - RNA, 20 nt, synthetic construct
  source 1..20: mol_type = other RNA
gtttgctcttaatcgtatgg

SEQ ID NO: 2892 - RNA, 20 nt, synthetic construct
  source 1..20: mol_type = other RNA
ccctcgtatgttttgaaagt

SEQ ID NO: 2893 - RNA, 20 nt, synthetic construct
  source 1..20: mol_type = other RNA
tcagatcattaccagttatt

SEQ ID NO: 2894 - RNA, 20 nt, synthetic construct
  source 1..20: mol_type = other RNA
agtctgtcctttaatagctt

SEQ ID NO: 2895 - RNA, 20 nt, synthetic construct
  source 1..20: mol_type = other RNA
acatttgtttaagactattt

SEQ ID NO: 2896 - RNA, 20 nt, synthetic construct
  source 1..20: mol_type = other RNA
aatgggatttacagcaacat

SEQ ID NO: 2897 - RNA, 20 nt, synthetic construct
  source 1..20: mol_type = other RNA
ttgctcttaatcgtatggat

SEQ ID NO: 2898 - RNA, 20 nt, synthetic construct
  source 1..20: mol_type = other RNA
ctcgtatgttttgaaagttt

SEQ ID NO: 2899 - RNA, 20 nt, synthetic construct
  source 1..20: mol_type = other RNA
tcagatcattaccagttatt

SEQ ID NO: 2900 - RNA, 20 nt, synthetic construct
  source 1..20: mol_type = other RNA
agtctgtcctttaatagctt

SEQ ID NO: 2901 - RNA, 20 nt, synthetic construct
  source 1..20: mol_type = other RNA
acatttgtttaagactattt

SEQ ID NO: 2902 - RNA, 20 nt, synthetic construct
  source 1..20: mol_type = other RNA
aatgggatttacagcaacat

SEQ ID NO: 2903 - RNA, 20 nt, synthetic construct
  source 1..20: mol_type = other RNA
ttgctcttaatcgtatggat

SEQ ID NO: 2904 - RNA, 20 nt, synthetic construct
  source 1..20: mol_type = other RNA
ctcgtatgttttgaaagttt

SEQ ID NO: 2905 - RNA, 20 nt, synthetic construct
  source 1..20: mol_type = other RNA
tcagatcattaccagttatt

SEQ ID NO: 2906 - RNA, 20 nt, synthetic construct
  source 1..20: mol_type = other RNA
agtctgtcctttaatagctt

SEQ ID NO: 2907 - RNA, 20 nt, synthetic construct
  source 1..20: mol_type = other RNA
acatttgtttaagactattt

SEQ ID NO: 2908 - RNA, 20 nt, synthetic construct
  source 1..20: mol_type = other RNA
aatgggatttacagcaacat

SEQ ID NO: 2909 - RNA, 20 nt, synthetic construct
  source 1..20: mol_type = other RNA
ttgctcttaatcgtatggat

SEQ ID NO: 2910 - RNA, 20 nt, synthetic construct
  source 1..20: mol_type = other RNA
ctcgtatgttttgaaagttt

SEQ ID NO: 2911 - RNA, 20 nt, synthetic construct
  source 1..20: mol_type = other RNA
aatcagatcattaccagtta

SEQ ID NO: 2912 - RNA, 20 nt, synthetic construct
  source 1..20: mol_type = other RNA
ctagtctgtcctttaatagc

SEQ ID NO: 2913 - RNA, 20 nt, synthetic construct
  source 1..20: mol_type = other RNA
gcacatttgtttaagactat

SEQ ID NO: 2914 - RNA, 20 nt, synthetic construct
  source 1..20: mol_type = other RNA
ccaatgggatttacagcaac

SEQ ID NO: 2915 - RNA, 20 nt, synthetic construct
  source 1..20: mol_type = other RNA
gtttgctcttaatcgtatgg

SEQ ID NO: 2916 - RNA, 20 nt, synthetic construct
  source 1..20: mol_type = other RNA
ccctcgtatgttttgaaagt

SEQ ID NO: 2917 - RNA, 20 nt, synthetic construct
  source 1..20: mol_type = other RNA
aagaaaatactccttctggg

SEQ ID NO: 2918 - RNA, 20 nt, synthetic construct
  source 1..20: mol_type = other RNA
tcagatcattaccagttagc

SEQ ID NO: 2919 - RNA, 20 nt, synthetic construct
  source 1..20: mol_type = other RNA
acctaactcccaggatgcgg

SEQ ID NO: 2920 - RNA, 20 nt, synthetic construct
  source 1..20: mol_type = other RNA
aagcacatttgtttaagact

SEQ ID NO: 2921 - RNA, 20 nt, synthetic construct
  source 1..20: mol_type = other RNA
tgctgtgtggccaattataa

SEQ ID NO: 2922 - RNA, 20 nt, synthetic construct
  source 1..20: mol_type = other RNA
tctgaaatggacaaatgacc

SEQ ID NO: 2923 - RNA, 20 nt, synthetic construct
  source 1..20: mol_type = other RNA
aagaaaatactccttctggg

SEQ ID NO: 2924 - RNA, 20 nt, synthetic construct
  source 1..20: mol_type = other RNA
tcagatcattaccagttagc

SEQ ID NO: 2925 - RNA, 20 nt, synthetic construct
  source 1..20: mol_type = other RNA
acctaactcccaggatgcgg

SEQ ID NO: 2926 - RNA, 20 nt, synthetic construct
  source 1..20: mol_type = other RNA
aagcacatttgtttaagact

SEQ ID NO: 2927 - RNA, 20 nt, synthetic construct
  source 1..20: mol_type = other RNA
tgctgtgtggccaattataa

SEQ ID NO: 2928 - RNA, 20 nt, synthetic construct
  source 1..20: mol_type = other RNA
tctgaaatggacaaatgacc

SEQ ID NO: 2929 - RNA, 20 nt, synthetic construct
  source 1..20: mol_type = other RNA
aagaaaatactccttctggg

SEQ ID NO: 2930 - RNA, 20 nt, synthetic construct
  source 1..20: mol_type = other RNA
tcagatcattaccagttagc

SEQ ID NO: 2931 - RNA, 20 nt, synthetic construct
  source 1..20: mol_type = other RNA
acctaactcccaggatgcgg

SEQ ID NO: 2932 - RNA, 20 nt, synthetic construct
  source 1..20: mol_type = other RNA
aagcacatttgtttaagact

SEQ ID NO: 2933 - RNA, 20 nt, synthetic construct
  source 1..20: mol_type = other RNA
tgctgtgtggccaattataa

SEQ ID NO: 2934 - RNA, 20 nt, synthetic construct
  source 1..20: mol_type = other RNA
tctgaaatggacaaatgacc

SEQ ID NO: 2935 - RNA, 20 nt, synthetic construct
  source 1..20: mol_type = other RNA
gaaaatactccttctgggtt

SEQ ID NO: 2936 - RNA, 20 nt, synthetic construct
  source 1..20: mol_type = other RNA
agatcattaccagttagctt

SEQ ID NO: 2937 - RNA, 20 nt, synthetic construct
  source 1..20: mol_type = other RNA
ctaactcccaggatgcggtt

SEQ ID NO: 2938 - RNA, 20 nt, synthetic construct
  source 1..20: mol_type = other RNA
gcacatttgtttaagactat

SEQ ID NO: 2939 - RNA, 20 nt, synthetic construct
  source 1..20: mol_type = other RNA
ctgtgtggccaattataatt

SEQ ID NO: 2940 - RNA, 20 nt, synthetic construct
  source 1..20: mol_type = other RNA
tgaaatggacaaatgacctt

SEQ ID NO: 2941 - RNA, 20 nt, synthetic construct
  source 1..20: mol_type = other RNA
gaaaatactccttctgggtt

SEQ ID NO: 2942 - RNA, 20 nt, synthetic construct
  source 1..20: mol_type = other RNA
agatcattaccagttagctt

SEQ ID NO: 2943 - RNA, 20 nt, synthetic construct
  source 1..20: mol_type = other RNA
ctaactcccaggatgcggtt

SEQ ID NO: 2944 - RNA, 20 nt, synthetic construct
  source 1..20: mol_type = other RNA
gcacatttgtttaagactat

SEQ ID NO: 2945 - RNA, 20 nt, synthetic construct
  source 1..20: mol_type = other RNA
ctgtgtggccaattataatt

SEQ ID NO: 2946 - RNA, 20 nt, synthetic construct
  source 1..20: mol_type = other RNA
tgaaatggacaaatgacctt

SEQ ID NO: 2947 - RNA, 20 nt, synthetic construct
  source 1..20: mol_type = other RNA
gaaaatactccttctgggtt

SEQ ID NO: 2948 - RNA, 20 nt, synthetic construct
  source 1..20: mol_type = other RNA
agatcattaccagttagctt

SEQ ID NO: 2949 - RNA, 20 nt, synthetic construct
  source 1..20: mol_type = other RNA
ctaactcccaggatgcggtt

SEQ ID NO: 2950 - RNA, 20 nt, synthetic construct
  source 1..20: mol_type = other RNA
gcacatttgtttaagactat

SEQ ID NO: 2951 - RNA, 20 nt, synthetic construct
  source 1..20: mol_type = other RNA
ctgtgtggccaattataatt

SEQ ID NO: 2952 - RNA, 20 nt, synthetic construct
  source 1..20: mol_type = other RNA
tgaaatggacaaatgacctt

SEQ ID NO: 2953 - RNA, 20 nt, synthetic construct
  source 1..20: mol_type = other RNA
aagaaaatactccttctggg

SEQ ID NO: 2954 - RNA, 20 nt, synthetic construct
  source 1..20: mol_type = other RNA
tcagatcattaccagttagc

SEQ ID NO: 2955 - RNA, 20 nt, synthetic construct
  source 1..20: mol_type = other RNA
acctaactcccaggatgcgg

SEQ ID NO: 2956 - RNA, 20 nt, synthetic construct
  source 1..20: mol_type = other RNA
aagcacatttgtttaagact

SEQ ID NO: 2957 - RNA, 20 nt, synthetic construct
  source 1..20: mol_type = other RNA
tgctgtgtggccaattataa

SEQ ID NO: 2958 - RNA, 20 nt, synthetic construct
  source 1..20: mol_type = other RNA
tctgaaatggacaaatgacc

SEQ ID NO: 2959 - RNA, 20 nt, synthetic construct
  source 1..20: mol_type = other RNA
gcacatttgtttaagactat

SEQ ID NO: 2960 - RNA, 20 nt, synthetic construct
  source 1..20: mol_type = other RNA
gcacatttgtttaagactat

SEQ ID NO: 2961 - RNA, 20 nt, synthetic construct
  source 1..20: mol_type = other RNA
gcacatttgtttaagactat

SEQ ID NO: 2962 - RNA, 20 nt, synthetic construct
  source 1..20: mol_type = other RNA
aagacggtacataatcctac

SEQ ID NO: 2963 - RNA, 20 nt, synthetic construct
  source 1..20: mol_type = other RNA
tttggaattctttgctctac

SEQ ID NO: 2964 - RNA, 20 nt, synthetic construct
  source 1..20: mol_type = other RNA
agtttggaattctttgctct

SEQ ID NO: 2965 - RNA, 20 nt, synthetic construct
  source 1..20: mol_type = other RNA
ttgctataatttcaaggagt

SEQ ID NO: 2966 - RNA, 20 nt, synthetic construct
  source 1..20: mol_type = other RNA
acatttgtttaagactattt

SEQ ID NO: 2967 - RNA, 20 nt, synthetic construct
  source 1..20: mol_type = other RNA
tggaattctttgctctactt

SEQ ID NO: 2968 - RNA, 20 nt, synthetic construct
  source 1..20: mol_type = other RNA
tttggaattctttgctctat

SEQ ID NO: 2969 - RNA, 20 nt, synthetic construct
  source 1..20: mol_type = other RNA
gctataatttcaaggagttt

SEQ ID NO: 2970 - RNA, 20 nt, synthetic construct
  source 1..20: mol_type = other RNA
acatttgtttaagactattt

SEQ ID NO: 2971 - RNA, 20 nt, synthetic construct
  source 1..20: mol_type = other RNA
gacggtacataatcctacat

SEQ ID NO: 2972 - RNA, 20 nt, synthetic construct
  source 1..20: mol_type = other RNA
tggaattctttgctctactt

SEQ ID NO: 2973 - RNA, 20 nt, synthetic construct
  source 1..20: mol_type = other RNA
tttggaattctttgctctat

SEQ ID NO: 2974 - RNA, 20 nt, synthetic construct
  source 1..20: mol_type = other RNA
gctataatttcaaggagttt

SEQ ID NO: 2975 - RNA, 20 nt, synthetic construct
  source 1..20: mol_type = other RNA
acatttgtttaagactattt

SEQ ID NO: 2976 - RNA, 20 nt, synthetic construct
  source 1..20: mol_type = other RNA
gacggtacataatcctacat

SEQ ID NO: 2977 - RNA, 20 nt, synthetic construct
  source 1..20: mol_type = other RNA
tggaattctttgctctactt

SEQ ID NO: 2978 - RNA, 20 nt, synthetic construct
  source 1..20: mol_type = other RNA
tttggaattctttgctctat

SEQ ID NO: 2979 - RNA, 20 nt, synthetic construct
  source 1..20: mol_type = other RNA
gctataatttcaaggagttt

SEQ ID NO: 2980 - RNA, 20 nt, synthetic construct
  source 1..20: mol_type = other RNA
acatttgtttaagactattt

SEQ ID NO: 2981 - RNA, 20 nt, synthetic construct
  source 1..20: mol_type = other RNA
gacggtacataatcctacat

SEQ ID NO: 2982 - RNA, 20 nt, synthetic construct
  source 1..20: mol_type = other RNA
tggaattctttgctctactt

SEQ ID NO: 2983 - RNA, 20 nt, synthetic construct
  source 1..20: mol_type = other RNA
tttggaattctttgctctat

SEQ ID NO: 2984 - RNA, 20 nt, synthetic construct
  source 1..20: mol_type = other RNA
gctataatttcaaggagttt

SEQ ID NO: 2985 - RNA, 20 nt, synthetic construct
  source 1..20: mol_type = other RNA
acatttgtttaagactattt

SEQ ID NO: 2986 - RNA, 20 nt, synthetic construct
  source 1..20: mol_type = other RNA
gacggtacataatcctacat

SEQ ID NO: 2987 - RNA, 20 nt, synthetic construct
  source 1..20: mol_type = other RNA
tggaattctttgctctactt

SEQ ID NO: 2988 - RNA, 20 nt, synthetic construct
  source 1..20: mol_type = other RNA
tttggaattctttgctctat

SEQ ID NO: 2989 - RNA, 20 nt, synthetic construct
  source 1..20: mol_type = other RNA
gctataatttcaaggagttt

SEQ ID NO: 2990 - RNA, 20 nt, synthetic construct
  source 1..20: mol_type = other RNA
accatccgatcagctgtaga

SEQ ID NO: 2991 - RNA, 20 nt, synthetic construct
  source 1..20: mol_type = other RNA
ggtcttgtgaatatggaaag

SEQ ID NO: 2992 - RNA, 20 nt, synthetic construct
  source 1..20: mol_type = other RNA
aagacggtacataatcctac

SEQ ID NO: 2993 - RNA, 20 nt, synthetic construct
  source 1..20: mol_type = other RNA
gcaaccggagaactcttaga

SEQ ID NO: 2994 - RNA, 20 nt, synthetic construct
  source 1..20: mol_type = other RNA
caccaaactcccattctttc

SEQ ID NO: 2995 - RNA, 20 nt, synthetic construct
  source 1..20: mol_type = other RNA
tgagctatgtgttggaagtg

SEQ ID NO: 2996 - RNA, 20 nt, synthetic construct
  source 1..20: mol_type = other RNA
tttggaattctttgctctac

SEQ ID NO: 2997 - RNA, 20 nt, synthetic construct
  source 1..20: mol_type = other RNA
agtttggaattctttgctct

SEQ ID NO: 2998 - RNA, 20 nt, synthetic construct
  source 1..20: mol_type = other RNA
ttgctataatttcaaggagt

SEQ ID NO: 2999 - RNA, 20 nt, synthetic construct
  source 1..20: mol_type = other RNA
accatccgatcagctgtaga

SEQ ID NO: 3000 - RNA, 20 nt, synthetic construct
  source 1..20: mol_type = other RNA
ggtcttgtgaatatggaaag

SEQ ID NO: 3001 - RNA, 20 nt, synthetic construct
  source 1..20: mol_type = other RNA
aagacggtacataatcctac

SEQ ID NO: 3002 - RNA, 20 nt, synthetic construct
  source 1..20: mol_type = other RNA
gcaaccggagaactcttaga

SEQ ID NO: 3003 - RNA, 20 nt, synthetic construct
  source 1..20: mol_type = other RNA
caccaaactcccattctttc

SEQ ID NO: 3004 - RNA, 20 nt, synthetic construct
  source 1..20: mol_type = other RNA
tgagctatgtgttggaagtg

SEQ ID NO: 3005 - RNA, 20 nt, synthetic construct
  source 1..20: mol_type = other RNA
tttggaattctttgctctac

SEQ ID NO: 3006 - RNA, 20 nt, synthetic construct
  source 1..20: mol_type = other RNA
agtttggaattctttgctct

SEQ ID NO: 3007 - RNA, 20 nt, synthetic construct
  source 1..20: mol_type = other RNA
ttgctataatttcaaggagt

SEQ ID NO: 3008 - RNA, 20 nt, synthetic construct
  source 1..20: mol_type = other RNA
atccggaagtttgaagatag

SEQ ID NO: 3009 - RNA, 20 nt, synthetic construct
  source 1..20: mol_type = other RNA
ccggaagtttgaagatagat

SEQ ID NO: 3010 - RNA, 20 nt, synthetic construct
  source 1..20: mol_type = other RNA
ccggaagtttgaagatagat

SEQ ID NO: 3011 - RNA, 20 nt, synthetic construct
  source 1..20: mol_type = other RNA
ccggaagtttgaagatagat

SEQ ID NO: 3012 - RNA, 20 nt, synthetic construct
  source 1..20: mol_type = other RNA
ccggaagtttgaagatagat

SEQ ID NO: 3013 - RNA, 20 nt, synthetic construct
  source 1..20: mol_type = other RNA
atccggaagtttgaagatag

SEQ ID NO: 3014 - RNA, 20 nt, synthetic construct
  source 1..20: mol_type = other RNA
atccggaagtttgaagatag

SEQ ID NO: 3015 - RNA, 20 nt, synthetic construct
  source 1..20: mol_type = other RNA
ccggaagtttgaagatagat

SEQ ID NO: 3016 - RNA, 20 nt, synthetic construct
  source 1..20: mol_type = other RNA
ccggaagtttgaagatagat

SEQ ID NO: 3017 - RNA, 20 nt, synthetic construct
  source 1..20: mol_type = other RNA
ccggaagtttgaagatagat

SEQ ID NO: 3018 - RNA, 20 nt, synthetic construct
  source 1..20: mol_type = other RNA
atccggaagtttgaagatag

SEQ ID NO: 3019 - RNA, 20 nt, synthetic construct
  source 1..20: mol_type = other RNA
tctgaaatggacaaatgacc

SEQ ID NO: 3020 - RNA, 20 nt, synthetic construct
  source 1..20: mol_type = other RNA
cacaaagacggtacataatc

SEQ ID NO: 3021 - RNA, 20 nt, synthetic construct
  source 1..20: mol_type = other RNA
acaaagacggtacataatcc

SEQ ID NO: 3022 - RNA, 20 nt, synthetic construct
  source 1..20: mol_type = other RNA
caaagacggtacataatcct

SEQ ID NO: 3023 - RNA, 20 nt, synthetic construct
  source 1..20: mol_type = other RNA
aaagacggtacataatccta

SEQ ID NO: 3024 - RNA, 20 nt, synthetic construct
  source 1..20: mol_type = other RNA
tagtttggaattctttgctc

SEQ ID NO: 3025 - RNA, 20 nt, synthetic construct
  source 1..20: mol_type = other RNA
ctgtgtggccaattataatt

SEQ ID NO: 3026 - RNA, 20 nt, synthetic construct
  source 1..20: mol_type = other RNA
gcacatttgtttaagactat

SEQ ID NO: 3027 - RNA, 20 nt, synthetic construct
  source 1..20: mol_type = other RNA
tggaattctttgctctactt

SEQ ID NO: 3028 - RNA, 20 nt, synthetic construct
  source 1..20: mol_type = other RNA
tttggaattctttgctctat

SEQ ID NO: 3029 - RNA, 20 nt, synthetic construct
  source 1..20: mol_type = other RNA
ctgtgtggccaattataatt

SEQ ID NO: 3030 - RNA, 20 nt, synthetic construct
  source 1..20: mol_type = other RNA
gcacatttgtttaagactat

SEQ ID NO: 3031 - RNA, 20 nt, synthetic construct
  source 1..20: mol_type = other RNA
tggaattctttgctctactt

SEQ ID NO: 3032 - RNA, 20 nt, synthetic construct
  source 1..20: mol_type = other RNA
tttggaattctttgctctat

SEQ ID NO: 3033 - RNA, 20 nt, synthetic construct
  source 1..20: mol_type = other RNA
gacggtacataatcctacat

SEQ ID NO: 3034 - RNA, 20 nt, synthetic construct
  source 1..20: mol_type = other RNA
ctgtgtggccaattataatt

SEQ ID NO: 3035 - RNA, 20 nt, synthetic construct
  source 1..20: mol_type = other RNA
gcacatttgtttaagactat

SEQ ID NO: 3036 - RNA, 20 nt, synthetic construct
  source 1..20: mol_type = other RNA
tggaattctttgctctactt

SEQ ID NO: 3037 - RNA, 20 nt, synthetic construct
  source 1..20: mol_type = other RNA
tttggaattctttgctctat

SEQ ID NO: 3038 - RNA, 20 nt, synthetic construct
  source 1..20: mol_type = other RNA
gacggtacataatcctacat

SEQ ID NO: 3039 - RNA, 20 nt, synthetic construct
  source 1..20: mol_type = other RNA
tctgaaatggacaaatgacc

SEQ ID NO: 3040 - RNA, 20 nt, synthetic construct
  source 1..20: mol_type = other RNA
tgaaatggacaaatgacctt

SEQ ID NO: 3041 - RNA, 20 nt, synthetic construct
  source 1..20: mol_type = other RNA
tgctgtgtggccaattataa

SEQ ID NO: 3042 - RNA, 20 nt, synthetic construct
  source 1..20: mol_type = other RNA
ctgtgtggccaattataatt

SEQ ID NO: 3043 - RNA, 20 nt, synthetic construct
  source 1..20: mol_type = other RNA
tgctgtgtggccaattataa

SEQ ID NO: 3044 - RNA, 20 nt, synthetic construct
  source 1..20: mol_type = other RNA
ctgtgtggccaattataatt

SEQ ID NO: 3045 - RNA, 20 nt, synthetic construct
  source 1..20: mol_type = other RNA
ctgtgtggccaattataatt

SEQ ID NO: 3046 - RNA, 20 nt, synthetic construct
  source 1..20: mol_type = other RNA
ccctcgtatgttttgaaagt

SEQ ID NO: 3047 - RNA, 20 nt, synthetic construct
  source 1..20: mol_type = other RNA
ctcgtatgttttgaaagttt

SEQ ID NO: 3048 - RNA, 20 nt, synthetic construct
  source 1..20: mol_type = other RNA
ccaatgggatttacagcaac

SEQ ID NO: 3049 - RNA, 20 nt, synthetic construct
  source 1..20: mol_type = other RNA
aatgggatttacagcaacat

SEQ ID NO: 3050 - RNA, 20 nt, synthetic construct
  source 1..20: mol_type = other RNA
ccaatgggatttacagcaac

SEQ ID NO: 3051 - RNA, 20 nt, synthetic construct
  source 1..20: mol_type = other RNA
aatgggatttacagcaacat

SEQ ID NO: 3052 - RNA, 20 nt, synthetic construct
  source 1..20: mol_type = other RNA
aatgggatttacagcaacat

SEQ ID NO: 3053 - RNA, 20 nt, synthetic construct
  source 1..20: mol_type = other RNA
gtttgctcttaatcgtatgg

SEQ ID NO: 3054 - RNA, 20 nt, synthetic construct
  source 1..20: mol_type = other RNA
ttgctcttaatcgtatggat

SEQ ID NO: 3055 - RNA, 20 nt, synthetic construct
  source 1..20: mol_type = other RNA
gtttgctcttaatcgtatgg

SEQ ID NO: 3056 - RNA, 20 nt, synthetic construct
  source 1..20: mol_type = other RNA
ttgctcttaatcgtatggat

SEQ ID NO: 3057 - RNA, 20 nt, synthetic construct
  source 1..20: mol_type = other RNA
ttgctcttaatcgtatggat

SEQ ID NO: 3058 - RNA, 20 nt, synthetic construct
  source 1..20: mol_type = other RNA
ttgctcttaatcgtatggat

SEQ ID NO: 3059 - RNA, 20 nt, synthetic construct
  source 1..20: mol_type = other RNA
aatcagatcattaccagtta

SEQ ID NO: 3060 - RNA, 20 nt, synthetic construct
  source 1..20: mol_type = other RNA
tcagatcattaccagttagc

SEQ ID NO: 3061 - RNA, 20 nt, synthetic construct
  source 1..20: mol_type = other RNA
tcagatcattaccagttatt

SEQ ID NO: 3062 - RNA, 20 nt, synthetic construct
  source 1..20: mol_type = other RNA
agatcattaccagttagctt

SEQ ID NO: 3063 - RNA, 20 nt, synthetic construct
  source 1..20: mol_type = other RNA
gcacatttgtttaagactat

SEQ ID NO: 3064 - RNA, 20 nt, synthetic construct
  source 1..20: mol_type = other RNA
aagcacatttgtttaagact

SEQ ID NO: 3065 - RNA, 20 nt, synthetic construct
  source 1..20: mol_type = other RNA
gcacatttgtttaagactat

SEQ ID NO: 3066 - RNA, 20 nt, synthetic construct
  source 1..20: mol_type = other RNA
gcacatttgtttaagactat

SEQ ID NO: 3067 - RNA, 20 nt, synthetic construct
  source 1..20: mol_type = other RNA
gcacatttgtttaagactat

SEQ ID NO: 3068 - RNA, 20 nt, synthetic construct
  source 1..20: mol_type = other RNA
gcacatttgtttaagactat

SEQ ID NO: 3069 - RNA, 20 nt, synthetic construct
  source 1..20: mol_type = other RNA
ctgtgtggccaattataatt

SEQ ID NO: 3070 - RNA, 18 nt, synthetic construct
  source 1..18: mol_type = other RNA
gaatcaagatggtgaaga

SEQ ID NO: 3071 - RNA, 18 nt, synthetic construct
  source 1..18: mol_type = other RNA
gaatcaagatggtgaaga

SEQ ID NO: 3072 - RNA, 20 nt, synthetic construct
  source 1..20: mol_type = other RNA
gtttgctcttaatcgtatgg

SEQ ID NO: 3073 - RNA, 20 nt, synthetic construct
  source 1..20: mol_type = other RNA
ccctcgtatgttttgaaagt

SEQ ID NO: 3074 - RNA, 20 nt, synthetic construct
  source 1..20: mol_type = other RNA
gacggtacataatcctacat

SEQ ID NO: 3075 - RNA, 20 nt, synthetic construct
  source 1..20: mol_type = other RNA
ctgtgtggccaattataatt

SEQ ID NO: 3076 - RNA, 20 nt, synthetic construct
  source 1..20: mol_type = other RNA
aatgggatttacagcaacat

SEQ ID NO: 3077 - RNA, 20 nt, synthetic construct
  source 1..20: mol_type = other RNA
aagcacatttgtttaagact

SEQ ID NO: 3078 - RNA, 20 nt, synthetic construct
  source 1..20: mol_type = other RNA
cgaagacagcgaccccatgc

SEQ ID NO: 3079 - RNA, 20 nt, synthetic construct
  source 1..20: mol_type = other RNA
catggacggccggtaacaaa

SEQ ID NO: 3080 - RNA, 20 nt, synthetic construct
  source 1..20: mol_type = other RNA
tgcacatgcgcacgcgcatg

SEQ ID NO: 3081 - RNA, 20 nt, synthetic construct
  source 1..20: mol_type = other RNA
gcacatgcgcacgcgcatgc

SEQ ID NO: 3082 - RNA, 20 nt, synthetic construct
  source 1..20: mol_type = other RNA
cacatgcgcacgcgcatgca

SEQ ID NO: 3083 - RNA, 20 nt, synthetic construct
  source 1..20: mol_type = other RNA
acatgcgcacgcgcatgcac

SEQ ID NO: 3084 - RNA, 20 nt, synthetic construct
  source 1..20: mol_type = other RNA
tctgcactaaaatccccaaa

SEQ ID NO: 3085 - RNA, 23 nt, synthetic construct
  source 1..23: mol_type = other RNA
ttctaagagttctccggttgctt

SEQ ID NO: 3086 - RNA, 23 nt, synthetic construct
  source 1..23: mol_type = other RNA
accataagcgtagaaccgaggtt

SEQ ID NO: 3087 - RNA, 23 nt, synthetic construct
  source 1..23: mol_type = other RNA
ttctaagagttctccggttgctt

SEQ ID NO: 3088 - RNA, 21 nt, synthetic construct
  source 1..21: mol_type = other RNA
agtattttatcatccattgtt

SEQ ID NO: 3089 - RNA, 21 nt, synthetic construct
  source 1..21: mol_type = other RNA
tgaaagaatgggagtttggtt

SEQ ID NO: 3090 - RNA, 23 nt, synthetic construct
  source 1..23: mol_type = other RNA
actttccatattcacaagacctt

SEQ ID NO: 3091 - RNA, 23 nt, synthetic construct
  source 1..23: mol_type = other RNA
ttctacagctgatcggatggttt

SEQ ID NO: 3092 - RNA, 23 nt, synthetic construct
  source 1..23: mol_type = other RNA
agtagagcaaagaattccaaatt

SEQ ID NO: 3093 - RNA, 23 nt, synthetic construct
  source 1..23: mol_type = other RNA
tagagcaaagaattccaaacttt

SEQ ID NO: 3094 - RNA, 23 nt, synthetic construct
  source 1..23: mol_type = other RNA
tgtaggattatgtaccgtctttt

SEQ ID NO: 3095 - RNA, 23 nt, synthetic construct
  source 1..23: mol_type = other RNA
acacttccaacacatagctcatt

SEQ ID NO: 3096 - RNA, 23 nt, synthetic construct
  source 1..23: mol_type = other RNA
tgaaagaatgggagtttggtgtt

SEQ ID NO: 3097 - RNA, 23 nt, synthetic construct
  source 1..23: mol_type = other RNA
ttctaagagttctccggttgctt

SEQ ID NO: 3098 - RNA, 23 nt, synthetic construct
  source 1..23: mol_type = other RNA
accataagcgtagaaccgaggtt

SEQ ID NO: 3099 - RNA, 23 nt, synthetic construct
  source 1..23: mol_type = other RNA
agtattttatcatccattgggtt

SEQ ID NO: 3100 - RNA, 23 nt, synthetic construct
  source 1..23: mol_type = other RNA
aactccttgaaattatagcaatt

SEQ ID NO: 3101 - RNA, 23 nt, synthetic construct
  source 1..23: mol_type = other RNA
tgtaggattatgtaccgtctttt

SEQ ID NO: 3102 - RNA, 23 nt, synthetic construct
  source 1..23: mol_type = other RNA
tagagcaaagaattccaaacttt

SEQ ID NO: 3103 - RNA, 23 nt, synthetic construct
  source 1..23: mol_type = other RNA
tgtaggattatgtaccgtctttt

SEQ ID NO: 3104 - RNA, 23 nt, synthetic construct
  source 1..23: mol_type = other RNA
tgtaggattatgtaccgtctttt

SEQ ID NO: 3105 - RNA, 23 nt, synthetic construct
  source 1..23: mol_type = other RNA
actttccatattcacaagacctt

SEQ ID NO: 3106 - RNA, 21 nt, synthetic construct
  source 1..21: mol_type = other RNA
agtagagcaaagaattccatt

SEQ ID NO: 3107 - RNA, 21 nt, synthetic construct
  source 1..21: mol_type = other RNA
tgtaggattatgtaccgtctt

SEQ ID NO: 3108 - RNA, 21 nt, synthetic construct
  source 1..21: mol_type = other RNA
tagagcaaagaattccaaatt

SEQ ID NO: 3109 - RNA, 21 nt, synthetic construct
  source 1..21: mol_type = other RNA
agtagagcaaagaattccatt

SEQ ID NO: 3110 - RNA, 21 nt, synthetic construct
  source 1..21: mol_type = other RNA
tgtaggattatgtaccgtctt

SEQ ID NO: 3111 - RNA, 21 nt, synthetic construct
  source 1..21: mol_type = other RNA
ttctacagctgatcggatgtt

SEQ ID NO: 3112 - RNA, 21 nt, synthetic construct
  source 1..21: mol_type = other RNA
aactccttgaaattatagctt

SEQ ID NO: 3113 - RNA, 21 nt, synthetic construct
  source 1..21: mol_type = other RNA
tagagcaaagaattccaaatt

SEQ ID NO: 3114 - RNA, 21 nt, synthetic construct
  source 1..21: mol_type = other RNA
agtagagcaaagaattccatt

SEQ ID NO: 3115 - RNA, 21 nt, synthetic construct
  source 1..21: mol_type = other RNA
tgtaggattatgtaccgtctt

SEQ ID NO: 3116 - RNA, 21 nt, synthetic construct
  source 1..21: mol_type = other RNA
tgtaggattatgtaccgtctt

SEQ ID NO: 3117 - RNA, 21 nt, synthetic construct
  source 1..21: mol_type = other RNA
tgtaggattatgtaccgtctt

SEQ ID NO: 3118 - RNA, 21 nt, synthetic construct
  source 1..21: mol_type = other RNA
tgtaggattatgtaccgtctt

SEQ ID NO: 3119 - RNA, 23 nt, synthetic construct
  source 1..23: mol_type = other RNA
tgtaggattatgtaccgtctttt

SEQ ID NO: 3120 - RNA, 21 nt, synthetic construct
  source 1..21: mol_type = other RNA
agtagagcaaagaattccatt

SEQ ID NO: 3121 - RNA, 21 nt, synthetic construct
  source 1..21: mol_type = other RNA
tagagcaaagaattccaaatt

SEQ ID NO: 3122 - RNA, 21 nt, synthetic construct
  source 1..21: mol_type = other RNA
tgtaggattatgtaccgtctt

SEQ ID NO: 3123 - RNA, 21 nt, synthetic construct
  source 1..21: mol_type = other RNA
agtagagcaaagaattccatt

SEQ ID NO: 3124 - RNA, 21 nt, synthetic construct
  source 1..21: mol_type = other RNA
tagagcaaagaattccaaatt

SEQ ID NO: 3125 - RNA, 21 nt, synthetic construct
  source 1..21: mol_type = other RNA
tgtaggattatgtaccgtctt

SEQ ID NO: 3126 - RNA, 21 nt, synthetic construct
  source 1..21: mol_type = other RNA
agtagagcaaagaattccatt

SEQ ID NO: 3127-3128 - skipped (2 entries)

SEQ ID NO: 3129 - RNA, 23 nt, synthetic construct
  source 1..23: mol_type = other RNA
ataactggtaatgatctgatttt

SEQ ID NO: 3130 - RNA, 23 nt, synthetic construct
  source 1..23: mol_type = other RNA
agctattaaaggacagactagtt

SEQ ID NO: 3131 - RNA, 23 nt, synthetic construct
  source 1..23: mol_type = other RNA
aatagtcttaaacaaatgtgctt

SEQ ID NO: 3132 - RNA, 23 nt, synthetic construct
  source 1..23: mol_type = other RNA
tgttgctgtaaatcccattggtt

SEQ ID NO: 3133 - RNA, 23 nt, synthetic construct
  source 1..23: mol_type = other RNA
tccatacgattaagagcaaactt

SEQ ID NO: 3134 - RNA, 23 nt, synthetic construct
  source 1..23: mol_type = other RNA
aactttcaaaacatacgagggtt

SEQ ID NO: 3135 - RNA, 23 nt, synthetic construct
  source 1..23: mol_type = other RNA
ataactggtaatgatctgatttt

SEQ ID NO: 3136 - RNA, 23 nt, synthetic construct
  source 1..23: mol_type = other RNA
agctattaaaggacagactagtt

SEQ ID NO: 3137 - RNA, 23 nt, synthetic construct
  source 1..23: mol_type = other RNA
aatagtcttaaacaaatgtgctt

SEQ ID NO: 3138 - RNA, 23 nt, synthetic construct
  source 1..23: mol_type = other RNA
tgttgctgtaaatcccattggtt

SEQ ID NO: 3139 - RNA, 23 nt, synthetic construct
  source 1..23: mol_type = other RNA
tccatacgattaagagcaaactt

SEQ ID NO: 3140 - RNA, 23 nt, synthetic construct
  source 1..23: mol_type = other RNA
aactttcaaaacatacgagggtt

SEQ ID NO: 3141 - RNA, 23 nt, synthetic construct
  source 1..23: mol_type = other RNA
ataactggtaatgatctgatttt

SEQ ID NO: 3142 - RNA, 23 nt, synthetic construct
  source 1..23: mol_type = other RNA
agctattaaaggacagactagtt

SEQ ID NO: 3143 - RNA, 23 nt, synthetic construct
  source 1..23: mol_type = other RNA
aatagtcttaaacaaatgtgctt

SEQ ID NO: 3144 - RNA, 23 nt, synthetic construct
  source 1..23: mol_type = other RNA
tgttgctgtaaatcccattggtt

SEQ ID NO: 3145 - RNA, 23 nt, synthetic construct
  source 1..23: mol_type = other RNA
tccatacgattaagagcaaactt

SEQ ID NO: 3146 - RNA, 23 nt, synthetic construct
  source 1..23: mol_type = other RNA
aactttcaaaacatacgagggtt

SEQ ID NO: 3147 - RNA, 21 nt, synthetic construct
  source 1..21: mol_type = other RNA
ataactggtaatgatctgatt

SEQ ID NO: 3148 - RNA, 21 nt, synthetic construct
  source 1..21: mol_type = other RNA
agctattaaaggacagacttt

SEQ ID NO: 3149 - RNA, 21 nt, synthetic construct
  source 1..21: mol_type = other RNA
aatagtcttaaacaaatgttt

SEQ ID NO: 3150 - RNA, 21 nt, synthetic construct
  source 1..21: mol_type = other RNA
tgttgctgtaaatcccatttt

SEQ ID NO: 3151 - RNA, 21 nt, synthetic construct
  source 1..21: mol_type = other RNA
tccatacgattaagagcaatt

SEQ ID NO: 3152 - RNA, 21 nt, synthetic construct
  source 1..21: mol_type = other RNA
aactttcaaaacatacgagtt

SEQ ID NO: 3153 - RNA, 21 nt, synthetic construct
  source 1..21: mol_type = other RNA
ataactggtaatgatctgatt

SEQ ID NO: 3154 - RNA, 21 nt, synthetic construct
  source 1..21: mol_type = other RNA
agctattaaaggacagacttt

SEQ ID NO: 3155 - RNA, 21 nt, synthetic construct
  source 1..21: mol_type = other RNA
aatagtcttaaacaaatgttt

SEQ ID NO: 3156 - RNA, 21 nt, synthetic construct
  source 1..21: mol_type = other RNA
tgttgctgtaaatcccatttt

SEQ ID NO: 3157 - RNA, 21 nt, synthetic construct
  source 1..21: mol_type = other RNA
tccatacgattaagagcaatt

SEQ ID NO: 3158 - RNA, 21 nt, synthetic construct
  source 1..21: mol_type = other RNA
aactttcaaaacatacgagtt

SEQ ID NO: 3159 - RNA, 21 nt, synthetic construct
  source 1..21: mol_type = other RNA
ataactggtaatgatctgatt

SEQ ID NO: 3160 - RNA, 21 nt, synthetic construct
  source 1..21: mol_type = other RNA
agctattaaaggacagacttt

SEQ ID NO: 3161 - RNA, 21 nt, synthetic construct
  source 1..21: mol_type = other RNA
aatagtcttaaacaaatgttt

SEQ ID NO: 3162 - RNA, 21 nt, synthetic construct
  source 1..21: mol_type = other RNA
tgttgctgtaaatcccatttt

SEQ ID NO: 3163 - RNA, 21 nt, synthetic construct
  source 1..21: mol_type = other RNA
tccatacgattaagagcaatt

SEQ ID NO: 3164 - RNA, 21 nt, synthetic construct
  source 1..21: mol_type = other RNA
aactttcaaaacatacgagtt

SEQ ID NO: 3165 - RNA, 23 nt, synthetic construct
  source 1..23: mol_type = other RNA
ataactggtaatgatctgatttt

SEQ ID NO: 3166 - RNA, 23 nt, synthetic construct
  source 1..23: mol_type = other RNA
agctattaaaggacagactagtt

SEQ ID NO: 3167 - RNA, 23 nt, synthetic construct
  source 1..23: mol_type = other RNA
aatagtcttaaacaaatgtgctt

SEQ ID NO: 3168 - RNA, 23 nt, synthetic construct
  source 1..23: mol_type = other RNA
tgttgctgtaaatcccattggtt

SEQ ID NO: 3169 - RNA, 23 nt, synthetic construct
  source 1..23: mol_type = other RNA
tccatacgattaagagcaaactt

SEQ ID NO: 3170 - RNA, 23 nt, synthetic construct
  source 1..23: mol_type = other RNA
aactttcaaaacatacgagggtt

SEQ ID NO: 3171 - RNA, 23 nt, synthetic construct
  source 1..23: mol_type = other RNA
acccagaaggagtattttctttt

SEQ ID NO: 3172 - RNA, 23 nt, synthetic construct
  source 1..23: mol_type = other RNA
agctaactggtaatgatctgatt

SEQ ID NO: 3173 - RNA, 23 nt, synthetic construct
  source 1..23: mol_type = other RNA
accgcatcctgggagttaggttt

SEQ ID NO: 3174 - RNA, 23 nt, synthetic construct
  source 1..23: mol_type = other RNA
tagtcttaaacaaatgtgctttt

SEQ ID NO: 3175 - RNA, 23 nt, synthetic construct
  source 1..23: mol_type = other RNA
attataattggccacacagcatt

SEQ ID NO: 3176 - RNA, 23 nt, synthetic construct
  source 1..23: mol_type = other RNA
aggtcatttgtccatttcagatt

SEQ ID NO: 3177 - RNA, 23 nt, synthetic construct
  source 1..23: mol_type = other RNA
acccagaaggagtattttctttt

SEQ ID NO: 3178 - RNA, 23 nt, synthetic construct
  source 1..23: mol_type = other RNA
agctaactggtaatgatctgatt

SEQ ID NO: 3179 - RNA, 23 nt, synthetic construct
  source 1..23: mol_type = other RNA
accgcatcctgggagttaggttt

SEQ ID NO: 3180 - RNA, 23 nt, synthetic construct
  source 1..23: mol_type = other RNA
tagtcttaaacaaatgtgctttt

SEQ ID NO: 3181 - RNA, 23 nt, synthetic construct
  source 1..23: mol_type = other RNA
attataattggccacacagcatt

SEQ ID NO: 3182 - RNA, 23 nt, synthetic construct
  source 1..23: mol_type = other RNA
aggtcatttgtccatttcagatt

SEQ ID NO: 3183 - RNA, 23 nt, synthetic construct
  source 1..23: mol_type = other RNA
acccagaaggagtattttctttt

SEQ ID NO: 3184 - RNA, 23 nt, synthetic construct
  source 1..23: mol_type = other RNA
agctaactggtaatgatctgatt

SEQ ID NO: 3185 - RNA, 23 nt, synthetic construct
  source 1..23: mol_type = other RNA
accgcatcctgggagttaggttt

SEQ ID NO: 3186 - RNA, 23 nt, synthetic construct
  source 1..23: mol_type = other RNA
tagtcttaaacaaatgtgctttt

SEQ ID NO: 3187 - RNA, 23 nt, synthetic construct
  source 1..23: mol_type = other RNA
attataattggccacacagcatt

SEQ ID NO: 3188 - RNA, 23 nt, synthetic construct
  source 1..23: mol_type = other RNA
aggtcatttgtccatttcagatt

SEQ ID NO: 3189 - RNA, 21 nt, synthetic construct
  source 1..21: mol_type = other RNA
acccagaaggagtattttctt

SEQ ID NO: 3190 - RNA, 21 nt, synthetic construct
  source 1..21: mol_type = other RNA
agctaactggtaatgatcttt

SEQ ID NO: 3191 - RNA, 21 nt, synthetic construct
  source 1..21: mol_type = other RNA
accgcatcctgggagttagtt

SEQ ID NO: 3192 - RNA, 21 nt, synthetic construct
  source 1..21: mol_type = other RNA
tagtcttaaacaaatgtgctt

SEQ ID NO: 3193 - RNA, 21 nt, synthetic construct
  source 1..21: mol_type = other RNA
attataattggccacacagtt

SEQ ID NO: 3194 - RNA, 21 nt, synthetic construct
  source 1..21: mol_type = other RNA
aggtcatttgtccatttcatt

SEQ ID NO: 3195 - RNA, 21 nt, synthetic construct
  source 1..21: mol_type = other RNA
acccagaaggagtattttctt

SEQ ID NO: 3196 - RNA, 21 nt, synthetic construct
  source 1..21: mol_type = other RNA
agctaactggtaatgatcttt

SEQ ID NO: 3197 - RNA, 21 nt, synthetic construct
  source 1..21: mol_type = other RNA
accgcatcctgggagttagtt

SEQ ID NO: 3198 - RNA, 21 nt, synthetic construct
  source 1..21: mol_type = other RNA
tagtcttaaacaaatgtgctt

SEQ ID NO: 3199 - RNA, 21 nt, synthetic construct
  source 1..21: mol_type = other RNA
attataattggccacacagtt

SEQ ID NO: 3200 - RNA, 21 nt, synthetic construct
  source 1..21: mol_type = other RNA
aggtcatttgtccatttcatt

SEQ ID NO: 3201 - RNA, 21 nt, synthetic construct
  source 1..21: mol_type = other RNA
acccagaaggagtattttctt

SEQ ID NO: 3202 - RNA, 21 nt, synthetic construct
  source 1..21: mol_type = other RNA
agctaactggtaatgatcttt

SEQ ID NO: 3203 - RNA, 21 nt, synthetic construct
  source 1..21: mol_type = other RNA
accgcatcctgggagttagtt

SEQ ID NO: 3204 - RNA, 21 nt, synthetic construct
  source 1..21: mol_type = other RNA
tagtcttaaacaaatgtgctt

SEQ ID NO: 3205 - RNA, 21 nt, synthetic construct
  source 1..21: mol_type = other RNA
attataattggccacacagtt

SEQ ID NO: 3206 - RNA, 21 nt, synthetic construct
  source 1..21: mol_type = other RNA
aggtcatttgtccatttcatt

SEQ ID NO: 3207 - RNA, 23 nt, synthetic construct
  source 1..23: mol_type = other RNA
acccagaaggagtattttctttt

SEQ ID NO: 3208 - RNA, 23 nt, synthetic construct
  source 1..23: mol_type = other RNA
agctaactggtaatgatctgatt

SEQ ID NO: 3209 - RNA, 23 nt, synthetic construct
  source 1..23: mol_type = other RNA
accgcatcctgggagttaggttt

SEQ ID NO: 3210 - RNA, 23 nt, synthetic construct
  source 1..23: mol_type = other RNA
tagtcttaaacaaatgtgctttt

SEQ ID NO: 3211 - RNA, 23 nt, synthetic construct
  source 1..23: mol_type = other RNA
attataattggccacacagcatt

SEQ ID NO: 3212 - RNA, 23 nt, synthetic construct
  source 1..23: mol_type = other RNA
aggtcatttgtccatttcagatt

SEQ ID NO: 3213 - RNA, 23 nt, synthetic construct
  source 1..23: mol_type = other RNA
aatagtcttaaacaaatgtgctt

SEQ ID NO: 3214 - RNA, 23 nt, synthetic construct
  source 1..23: mol_type = other RNA
aatagtcttaaacaaatgtgctt

SEQ ID NO: 3215 - RNA, 23 nt, synthetic construct
  source 1..23: mol_type = other RNA
aatagtcttaaacaaatgtgctt

SEQ ID NO: 3216 - RNA, 23 nt, synthetic construct
  source 1..23: mol_type = other RNA
tgtaggattatgtaccgtctttt

SEQ ID NO: 3217 - RNA, 23 nt, synthetic construct
  source 1..23: mol_type = other RNA
agtagagcaaagaattccaaatt

SEQ ID NO: 3218 - RNA, 23 nt, synthetic construct
  source 1..23: mol_type = other RNA
tagagcaaagaattccaaacttt

SEQ ID NO: 3219 - RNA, 23 nt, synthetic construct
  source 1..23: mol_type = other RNA
aactccttgaaattatagcaatt

SEQ ID NO: 3220 - RNA, 21 nt, synthetic construct
  source 1..21: mol_type = other RNA
aatagtcttaaacaaatgttt

SEQ ID NO: 3221 - RNA, 21 nt, synthetic construct
  source 1..21: mol_type = other RNA
agtagagcaaagaattccatt

SEQ ID NO: 3222 - RNA, 21 nt, synthetic construct
  source 1..21: mol_type = other RNA
tagagcaaagaattccaaatt

SEQ ID NO: 3223 - RNA, 21 nt, synthetic construct
  source 1..21: mol_type = other RNA
aactccttgaaattatagctt

SEQ ID NO: 3224 - RNA, 21 nt, synthetic construct
  source 1..21: mol_type = other RNA
aatagtcttaaacaaatgttt

SEQ ID NO: 3225 - RNA, 21 nt, synthetic construct
  source 1..21: mol_type = other RNA
tgtaggattatgtaccgtctt

SEQ ID NO: 3226 - RNA, 21 nt, synthetic construct
  source 1..21: mol_type = other RNA
agtagagcaaagaattccatt

SEQ ID NO: 3227 - RNA, 21 nt, synthetic construct
  source 1..21: mol_type = other RNA
tagagcaaagaattccaaatt

SEQ ID NO: 3228 - RNA, 21 nt, synthetic construct
  source 1..21: mol_type = other RNA
aactccttgaaattatagctt

SEQ ID NO: 3229 - RNA, 21 nt, synthetic construct
  source 1..21: mol_type = other RNA
aatagtcttaaacaaatgttt

SEQ ID NO: 3230 - RNA, 21 nt, synthetic construct
  source 1..21: mol_type = other RNA
tgtaggattatgtaccgtctt

SEQ ID NO: 3231 - RNA, 21 nt, synthetic construct
  source 1..21: mol_type = other RNA
agtagagcaaagaattccatt

SEQ ID NO: 3232 - RNA, 21 nt, synthetic construct
  source 1..21: mol_type = other RNA
tagagcaaagaattccaaatt

SEQ ID NO: 3233 - RNA, 21 nt, synthetic construct
  source 1..21: mol_type = other RNA
aactccttgaaattatagctt

SEQ ID NO: 3234 - RNA, 21 nt, synthetic construct
  source 1..21: mol_type = other RNA
aatagtcttaaacaaatgttt

SEQ ID NO: 3235 - RNA, 21 nt, synthetic construct
  source 1..21: mol_type = other RNA
tgtaggattatgtaccgtctt

SEQ ID NO: 3236 - RNA, 21 nt, synthetic construct
  source 1..21: mol_type = other RNA
agtagagcaaagaattccatt

SEQ ID NO: 3237 - RNA, 21 nt, synthetic construct
  source 1..21: mol_type = other RNA
tagagcaaagaattccaaatt

SEQ ID NO: 3238 - RNA, 21 nt, synthetic construct
  source 1..21: mol_type = other RNA
aactccttgaaattatagctt

SEQ ID NO: 3239 - RNA, 21 nt, synthetic construct
  source 1..21: mol_type = other RNA
aatagtcttaaacaaatgttt

SEQ ID NO: 3240 - RNA, 21 nt, synthetic construct
  source 1..21: mol_type = other RNA
tgtaggattatgtaccgtctt

SEQ ID NO: 3241 - RNA, 21 nt, synthetic construct
  source 1..21: mol_type = other RNA
agtagagcaaagaattccatt

SEQ ID NO: 3242 - RNA, 21 nt, synthetic construct
  source 1..21: mol_type = other RNA
tagagcaaagaattccaaatt

SEQ ID NO: 3243 - RNA, 21 nt, synthetic construct
  source 1..21: mol_type = other RNA
aactccttgaaattatagctt

SEQ ID NO: 3244 - RNA, 23 nt, synthetic construct
  source 1..23: mol_type = other RNA
ttctacagctgatcggatggttt

SEQ ID NO: 3245 - RNA, 23 nt, synthetic construct
  source 1..23: mol_type = other RNA
actttccatattcacaagacctt

SEQ ID NO: 3246 - RNA, 23 nt, synthetic construct
  source 1..23: mol_type = other RNA
tgtaggattatgtaccgtctttt

SEQ ID NO: 3247 - RNA, 23 nt, synthetic construct
  source 1..23: mol_type = other RNA
ttctaagagttctccggttgctt

SEQ ID NO: 3248 - RNA, 23 nt, synthetic construct
  source 1..23: mol_type = other RNA
tgaaagaatgggagtttggtgtt

SEQ ID NO: 3249 - RNA, 23 nt, synthetic construct
  source 1..23: mol_type = other RNA
acacttccaacacatagctcatt

SEQ ID NO: 3250 - RNA, 23 nt, synthetic construct
  source 1..23: mol_type = other RNA
agtagagcaaagaattccaaatt

SEQ ID NO: 3251 - RNA, 23 nt, synthetic construct
  source 1..23: mol_type = other RNA
tagagcaaagaattccaaacttt

SEQ ID NO: 3252 - RNA, 23 nt, synthetic construct
  source 1..23: mol_type = other RNA
aactccttgaaattatagcaatt

SEQ ID NO: 3253 - RNA, 23 nt, synthetic construct
  source 1..23: mol_type = other RNA
ttctacagctgatcggatggttt

SEQ ID NO: 3254 - RNA, 23 nt, synthetic construct
  source 1..23: mol_type = other RNA
actttccatattcacaagacctt

SEQ ID NO: 3255 - RNA, 23 nt, synthetic construct
  source 1..23: mol_type = other RNA
tgtaggattatgtaccgtctttt

SEQ ID NO: 3256 - RNA, 23 nt, synthetic construct
  source 1..23: mol_type = other RNA
ttctaagagttctccggttgctt

SEQ ID NO: 3257 - RNA, 23 nt, synthetic construct
  source 1..23: mol_type = other RNA
tgaaagaatgggagtttggtgtt

SEQ ID NO: 3258 - RNA, 23 nt, synthetic construct
  source 1..23: mol_type = other RNA
acacttccaacacatagctcatt

SEQ ID NO: 3259 - RNA, 23 nt, synthetic construct
  source 1..23: mol_type = other RNA
agtagagcaaagaattccaaatt

SEQ ID NO: 3260 - RNA, 23 nt, synthetic construct
  source 1..23: mol_type = other RNA
tagagcaaagaattccaaacttt

SEQ ID NO: 3261 - RNA, 23 nt, synthetic construct
  source 1..23: mol_type = other RNA
aactccttgaaattatagcaatt

SEQ ID NO: 3262 - RNA, 23 nt, synthetic construct
  source 1..23: mol_type = other RNA
tctatcttcaaacttccggattt

SEQ ID NO: 3263 - RNA, 21 nt, synthetic construct
  source 1..21: mol_type = other RNA
tctatcttcaaacttccggtt

SEQ ID NO: 3264 - RNA, 21 nt, synthetic construct
  source 1..21: mol_type = other RNA
tctatcttcaaacttccggtt

SEQ ID NO: 3265 - RNA, 21 nt, synthetic construct
  source 1..21: mol_type = other RNA
tctatcttcaaacttccggtt

SEQ ID NO: 3266 - RNA, 21 nt, synthetic construct
  source 1..21: mol_type = other RNA
tctatcttcaaacttccggtt

SEQ ID NO: 3267 - RNA, 23 nt, synthetic construct
  source 1..23: mol_type = other RNA
tctatcttcaaacttccggattt

SEQ ID NO: 3268 - RNA, 23 nt, synthetic construct
  source 1..23: mol_type = other RNA
tctatcttcaaacttccggattt

SEQ ID NO: 3269 - RNA, 21 nt, synthetic construct
  source 1..21: mol_type = other RNA
tctatcttcaaacttccggtt

SEQ ID NO: 3270 - RNA, 21 nt, synthetic construct
  source 1..21: mol_type = other RNA
tctatcttcaaacttccggtt

SEQ ID NO: 3271 - RNA, 21 nt, synthetic construct
  source 1..21: mol_type = other RNA
tctatcttcaaacttccggtt

SEQ ID NO: 3272 - RNA, 23 nt, synthetic construct
  source 1..23: mol_type = other RNA
tctatcttcaaacttccggattt

SEQ ID NO: 3273 - RNA, 23 nt, synthetic construct
  source 1..23: mol_type = other RNA
aggtcatttgtccatttcagatt

SEQ ID NO: 3274 - RNA, 23 nt, synthetic construct
  source 1..23: mol_type = other RNA
agattatgtaccgtctttgtgtt

SEQ ID NO: 3275 - RNA, 23 nt, synthetic construct
  source 1..23: mol_type = other RNA
aggattatgtaccgtctttgttt

SEQ ID NO: 3276 - RNA, 23 nt, synthetic construct
  source 1..23: mol_type = other RNA
taggattatgtaccgtctttgtt

SEQ ID NO: 3277 - RNA, 23 nt, synthetic construct
  source 1..23: mol_type = other RNA
ataggattatgtaccgtcttttt

SEQ ID NO: 3278 - RNA, 23 nt, synthetic construct
  source 1..23: mol_type = other RNA
agagcaaagaattccaaactatt

SEQ ID NO: 3279 - RNA, 21 nt, synthetic construct
  source 1..21: mol_type = other RNA
attataattggccacacagtt

SEQ ID NO: 3280 - RNA, 21 nt, synthetic construct
  source 1..21: mol_type = other RNA
tagtcttaaacaaatgtgctt

SEQ ID NO: 3281 - RNA, 21 nt, synthetic construct
  source 1..21: mol_type = other RNA
agtagagcaaagaattccatt

SEQ ID NO: 3282 - RNA, 21 nt, synthetic construct
  source 1..21: mol_type = other RNA
tagagcaaagaattccaaatt

SEQ ID NO: 3283 - RNA, 21 nt, synthetic construct
  source 1..21: mol_type = other RNA
attataattggccacacagtt

SEQ ID NO: 3284 - RNA, 21 nt, synthetic construct
  source 1..21: mol_type = other RNA
tagtcttaaacaaatgtgctt

SEQ ID NO: 3285 - RNA, 21 nt, synthetic construct
  source 1..21: mol_type = other RNA
agtagagcaaagaattccatt

SEQ ID NO: 3286 - RNA, 21 nt, synthetic construct
  source 1..21: mol_type = other RNA
tagagcaaagaattccaaatt

SEQ ID NO: 3287 - RNA, 21 nt, synthetic construct
  source 1..21: mol_type = other RNA
tgtaggattatgtaccgtctt

SEQ ID NO: 3288 - RNA, 21 nt, synthetic construct
  source 1..21: mol_type = other RNA
attataattggccacacagtt

SEQ ID NO: 3289 - RNA, 21 nt, synthetic construct
  source 1..21: mol_type = other RNA
tagtcttaaacaaatgtgctt

SEQ ID NO: 3290 - RNA, 21 nt, synthetic construct
  source 1..21: mol_type = other RNA
agtagagcaaagaattccatt

SEQ ID NO: 3291 - RNA, 21 nt, synthetic construct
  source 1..21: mol_type = other RNA
tagagcaaagaattccaaatt

SEQ ID NO: 3292 - RNA, 21 nt, synthetic construct
  source 1..21: mol_type = other RNA
tgtaggattatgtaccgtctt

SEQ ID NO: 3293 - RNA, 23 nt, synthetic construct
  source 1..23: mol_type = other RNA
aggtcatttgtccatttcagatt

SEQ ID NO: 3294 - RNA, 21 nt, synthetic construct
  source 1..21: mol_type = other RNA
aggtcatttgtccatttcatt

SEQ ID NO: 3295 - RNA, 23 nt, synthetic construct
  source 1..23: mol_type = other RNA
attataattggccacacagcatt

SEQ ID NO: 3296 - RNA, 21 nt, synthetic construct
  source 1..21: mol_type = other RNA
attataattggccacacagtt

SEQ ID NO: 3297 - RNA, 23 nt, synthetic construct
  source 1..23: mol_type = other RNA
attataattggccacacagcatt

SEQ ID NO: 3298 - RNA, 21 nt, synthetic construct
  source 1..21: mol_type = other RNA
attataattggccacacagtt

SEQ ID NO: 3299 - RNA, 21 nt, synthetic construct
  source 1..21: mol_type = other RNA
attataattggccacacagtt

SEQ ID NO: 3300 - RNA, 23 nt, synthetic construct
  source 1..23: mol_type = other RNA
aactttcaaaacatacgagggtt

SEQ ID NO: 3301 - RNA, 21 nt, synthetic construct
  source 1..21: mol_type = other RNA
aactttcaaaacatacgagtt

SEQ ID NO: 3302 - RNA, 23 nt, synthetic construct
  source 1..23: mol_type = other RNA
tgttgctgtaaatcccattggtt

SEQ ID NO: 3303 - RNA, 21 nt, synthetic construct
  source 1..21: mol_type = other RNA
tgttgctgtaaatcccatttt

SEQ ID NO: 3304 - RNA, 23 nt, synthetic construct
  source 1..23: mol_type = other RNA
tgttgctgtaaatcccattggtt

SEQ ID NO: 3305 - RNA, 21 nt, synthetic construct
  source 1..21: mol_type = other RNA
tgttgctgtaaatcccatttt

SEQ ID NO: 3306 - RNA, 21 nt, synthetic construct
  source 1..21: mol_type = other RNA
tgttgctgtaaatcccatttt

SEQ ID NO: 3307 - RNA, 23 nt, synthetic construct
  source 1..23: mol_type = other RNA
tccatacgattaagagcaaactt

SEQ ID NO: 3308 - RNA, 21 nt, synthetic construct
  source 1..21: mol_type = other RNA
tccatacgattaagagcaatt

SEQ ID NO: 3309 - RNA, 23 nt, synthetic construct
  source 1..23: mol_type = other RNA
tccatacgattaagagcaaactt

SEQ ID NO: 3310 - RNA, 21 nt, synthetic construct
  source 1..21: mol_type = other RNA
tccatacgattaagagcaatt

SEQ ID NO: 3311 - RNA, 21 nt, synthetic construct
  source 1..21: mol_type = other RNA
tccatacgattaagagcaatt

SEQ ID NO: 3312 - RNA, 21 nt, synthetic construct
  source 1..21: mol_type = other RNA
tccatacgattaagagcaatt

SEQ ID NO: 3313 - RNA, 23 nt, synthetic construct
  source 1..23: mol_type = other RNA
ataactggtaatgatctgatttt

SEQ ID NO: 3314 - RNA, 23 nt, synthetic construct
  source 1..23: mol_type = other RNA
agctaactggtaatgatctgatt

SEQ ID NO: 3315 - RNA, 21 nt, synthetic construct
  source 1..21: mol_type = other RNA
ataactggtaatgatctgatt

SEQ ID NO: 3316 - RNA, 21 nt, synthetic construct
  source 1..21: mol_type = other RNA
agctaactggtaatgatcttt

SEQ ID NO: 3317 - RNA, 21 nt, synthetic construct
  source 1..21: mol_type = other RNA
tagtcttaaacaaatgtgctt

SEQ ID NO: 3318 - RNA, 23 nt, synthetic construct
  source 1..23: mol_type = other RNA
tagtcttaaacaaatgtgctttt

SEQ ID NO: 3319 - RNA, 21 nt, synthetic construct
  source 1..21: mol_type = other RNA
tagtcttaaacaaatgtgctt

SEQ ID NO: 3320 - RNA, 21 nt, synthetic construct
  source 1..21: mol_type = other RNA
tagtcttaaacaaatgtgctt

SEQ ID NO: 3321 - RNA, 21 nt, synthetic construct
  source 1..21: mol_type = other RNA
tagtcttaaacaaatgtgctt

SEQ ID NO: 3322 - RNA, 23 nt, synthetic construct
  source 1..23: mol_type = other RNA
aatagtcttaaacaaatgtgctt

SEQ ID NO: 3323 - RNA, 21 nt, synthetic construct
  source 1..21: mol_type = other RNA
attataattggccacacagtt

SEQ ID NO: 3324 - RNA, 21 nt, synthetic construct
  source 1..21: mol_type = other RNA
atcttcaccatcttgattcct

SEQ ID NO: 3325 - RNA, 21 nt, synthetic construct
  source 1..21: mol_type = other RNA
atcttcaccatcttgattcct

SEQ ID NO: 3326 - RNA, 23 nt, synthetic construct
  source 1..23: mol_type = other RNA
tccatacgattaagagcaaactt

SEQ ID NO: 3327 - RNA, 23 nt, synthetic construct
  source 1..23: mol_type = other RNA
aactttcaaaacatacgagggtt

SEQ ID NO: 3328 - RNA, 21 nt, synthetic construct
  source 1..21: mol_type = other RNA
tgtaggattatgtaccgtctt

SEQ ID NO: 3329 - RNA, 21 nt, synthetic construct
  source 1..21: mol_type = other RNA
attataattggccacacagtt

SEQ ID NO: 3330 - RNA, 21 nt, synthetic construct
  source 1..21: mol_type = other RNA
tgttgctgtaaatcccatttt

SEQ ID NO: 3331 - RNA, 23 nt, synthetic construct
  source 1..23: mol_type = other RNA
tagtcttaaacaaatgtgctttt

SEQ ID NO: 3332 - RNA, 23 nt, synthetic construct
  source 1..23: mol_type = other RNA
agcatggggtcgctgtcttcgtt

SEQ ID NO: 3333 - RNA, 23 nt, synthetic construct
  source 1..23: mol_type = other RNA
atttgttaccggccgtccatgtt

SEQ ID NO: 3334 - RNA, 23 nt, synthetic construct
  source 1..23: mol_type = other RNA
acatgcgcgtgcgcatgtgcatt

SEQ ID NO: 3335 - RNA, 23 nt, synthetic construct
  source 1..23: mol_type = other RNA
tgcatgcgcgtgcgcatgtgctt

SEQ ID NO: 3336 - RNA, 23 nt, synthetic construct
  source 1..23: mol_type = other RNA
atgcatgcgcgtgcgcatgtgtt

SEQ ID NO: 3337 - RNA, 23 nt, synthetic construct
  source 1..23: mol_type = other RNA
agtgcatgcgcgtgcgcatgttt

SEQ ID NO: 3338 - RNA, 23 nt, synthetic construct
  source 1..23: mol_type = other RNA
atttggggattttagtgcagatt
